United States Patent Application Publication US 2011/0177960 A1 - sequence listing, part 26

SEQ ID NO: 471083 - DNA, 25 bp, Artificial
  probe
  misc_feature (1)..(25): SEQ ID NO: 7552; WAN024GM6; Start 14; Stop 38
gagacgattccaaacaacaatactt

SEQ ID NO: 471084 - DNA, 25 bp, Artificial
  probe
  misc_feature (1)..(25): SEQ ID NO: 7552; WAN024GM6; Start 12; Stop 36
aagagacgattccaaacaacaatac

SEQ ID NO: 471085 - DNA, 25 bp, Artificial
  probe
  misc_feature (1)..(25): SEQ ID NO: 7552; WAN024GM6; Start 11; Stop 35
caagagacgattccaaacaacaata

SEQ ID NO: 471086 - DNA, 25 bp, Artificial
  probe
  misc_feature (1)..(25): SEQ ID NO: 7552; WAN024GM6; Start 18; Stop 42
cgattccaaacaacaatactttcca

SEQ ID NO: 471087 - DNA, 25 bp, Artificial
  probe
  misc_feature (1)..(25): SEQ ID NO: 7552; WAN024GM6; Start 17; Stop 41
acgattccaaacaacaatactttcc

SEQ ID NO: 471088 - DNA, 25 bp, Artificial
  probe
  misc_feature (1)..(25): SEQ ID NO: 7552; WAN024GM6; Start 13; Stop 37
agagacgattccaaacaacaatact

SEQ ID NO: 471089 - DNA, 25 bp, Artificial
  probe
  misc_feature (1)..(25): SEQ ID NO: 7552; WAN024GM6; Start 203; Stop 227
tattggcaaagggaggtaaagatag

SEQ ID NO: 471090 - DNA, 25 bp, Artificial
  probe
  misc_feature (1)..(25): SEQ ID NO: 7552; WAN024GM6; Start 202; Stop 226
gtattggcaaagggaggtaaagata

SEQ ID NO: 471091 - DNA, 25 bp, Artificial
  probe
  misc_feature (1)..(25): SEQ ID NO: 7552; WAN024GM6; Start 15; Stop 39
agacgattccaaacaacaatacttt

SEQ ID NO: 471092 - DNA, 25 bp, Artificial
  probe
  misc_feature (1)..(25): SEQ ID NO: 7552; WAN024GM6; Start 33; Stop 57
atactttccaattcagccttatcca

SEQ ID NO: 471093 - DNA, 25 bp, Artificial
  probe
  misc_feature (1)..(25): SEQ ID NO: 7552; WAN024GM6; Start 28; Stop 52
caacaatactttccaattcagcctt

SEQ ID NO: 471094 - DNA, 25 bp, Artificial
  probe
  misc_feature (1)..(25): SEQ ID NO: 7552; WAN024GM6; Start 16; Stop 40
gacgattccaaacaacaatactttc

SEQ ID NO: 471095 - DNA, 25 bp, Artificial
  probe
  misc_feature (1)..(25): SEQ ID NO: 7552; WAN024GM6; Start 34; Stop 58
tactttccaattcagccttatccag

SEQ ID NO: 471096 - DNA, 25 bp, Artificial
  probe
  misc_feature (1)..(25): SEQ ID NO: 7552; WAN024GM6; Start 26; Stop 50
aacaacaatactttccaattcagcc

SEQ ID NO: 471097 - DNA, 25 bp, Artificial
  probe
  misc_feature (1)..(25): SEQ ID NO: 7552; WAN024GM6; Start 121; Stop 145
cttcatttagaacaccatcacgatt

SEQ ID NO: 471098 - DNA, 25 bp, Artificial
  probe
  misc_feature (1)..(25): SEQ ID NO: 7552; WAN024GM6; Start 246; Stop 270
tacaagaacaaaccaaatccgataa

SEQ ID NO: 471099 - DNA, 25 bp, Artificial
  probe
  misc_feature (1)..(25): SEQ ID NO: 7552; WAN024GM6; Start 32; Stop 56
aatactttccaattcagccttatcc

SEQ ID NO: 471100 - DNA, 25 bp, Artificial
  probe
  misc_feature (1)..(25): SEQ ID NO: 7552; WAN024GM6; Start 25; Stop 49
aaacaacaatactttccaattcagc

SEQ ID NO: 471101 - DNA, 25 bp, Artificial
  probe
  misc_feature (1)..(25): SEQ ID NO: 7552; WAN024GM6; Start 29; Stop 53
aacaatactttccaattcagcctta

SEQ ID NO: 471102 - DNA, 25 bp, Artificial
  probe
  misc_feature (1)..(25): SEQ ID NO: 7552; WAN024GM6; Start 27; Stop 51
acaacaatactttccaattcagcct

SEQ ID NO: 471103 - DNA, 25 bp, Artificial
  probe
  misc_feature (1)..(25): SEQ ID NO: 7552; WAN024GM6; Start 4; Stop 28
catagaccaagagacgattccaaac

SEQ ID NO: 471104 - DNA, 25 bp, Artificial
  probe
  misc_feature (1)..(25): SEQ ID NO: 7552; WAN024GM6; Start 19; Stop 43
gattccaaacaacaatactttccaa

SEQ ID NO: 471105 - DNA, 25 bp, Artificial
  probe
  misc_feature (1)..(25): SEQ ID NO: 7552; WAN024GM6; Start 30; Stop 54
acaatactttccaattcagccttat

SEQ ID NO: 471106 - DNA, 25 bp, Artificial
  probe
  misc_feature (1)..(25): SEQ ID NO: 7552; WAN024GM6; Start 23; Stop 47
ccaaacaacaatactttccaattca

SEQ ID NO: 471107 - DNA, 25 bp, Artificial
  probe
  misc_feature (1)..(25): SEQ ID NO: 7552; WAN024GM6; Start 127; Stop 151
ttagaacaccatcacgattatctag

SEQ ID NO: 471108 - DNA, 25 bp, Artificial
  probe
  misc_feature (1)..(25): SEQ ID NO: 7552; WAN024GM6; Start 123; Stop 147
tcatttagaacaccatcacgattat

SEQ ID NO: 471109 - DNA, 25 bp, Artificial
  probe
  misc_feature (1)..(25): SEQ ID NO: 7552; WAN024GM6; Start 245; Stop 269
gtacaagaacaaaccaaatccgata

SEQ ID NO: 471110 - DNA, 25 bp, Artificial
  probe
  misc_feature (1)..(25): SEQ ID NO: 7552; WAN024GM6; Start 201; Stop 225
agtattggcaaagggaggtaaagat

SEQ ID NO: 471111 - DNA, 25 bp, Artificial
  probe
  misc_feature (1)..(25): SEQ ID NO: 7552; WAN024GM6; Start 5; Stop 29
atagaccaagagacgattccaaaca

SEQ ID NO: 471112 - DNA, 25 bp, Artificial
  probe
  misc_feature (1)..(25): SEQ ID NO: 7552; WAN024GM6; Start 22; Stop 46
tccaaacaacaatactttccaattc

SEQ ID NO: 471113 - DNA, 25 bp, Artificial
  probe
  misc_feature (1)..(25): SEQ ID NO: 7552; WAN024GM6; Start 122; Stop 146
ttcatttagaacaccatcacgatta

SEQ ID NO: 471114 - DNA, 25 bp, Artificial
  probe
  misc_feature (1)..(25): SEQ ID NO: 7553; WAN024CPL; Start 108; Stop 132
caatatcttctacttgatccagtgt

SEQ ID NO: 471115 - DNA, 25 bp, Artificial
  probe
  misc_feature (1)..(25): SEQ ID NO: 7553; WAN024CPL; Start 31; Stop 55
aataacacggatactgtccatgatt

SEQ ID NO: 471116 - DNA, 25 bp, Artificial
  probe
  misc_feature (1)..(25): SEQ ID NO: 7553; WAN024CPL; Start 30; Stop 54
caataacacggatactgtccatgat

SEQ ID NO: 471117 - DNA, 25 bp, Artificial
  probe
  misc_feature (1)..(25): SEQ ID NO: 7553; WAN024CPL; Start 170; Stop 194
tggtagatataaggagttcctctca

SEQ ID NO: 471118 - DNA, 25 bp, Artificial
  probe
  misc_feature (1)..(25): SEQ ID NO: 7553; WAN024CPL; Start 156; Stop 180
caatctcctcaccttggtagatata

SEQ ID NO: 471119 - DNA, 25 bp, Artificial
  probe
  misc_feature (1)..(25): SEQ ID NO: 7553; WAN024CPL; Start 169; Stop 193
ttggtagatataaggagttcctctc

SEQ ID NO: 471120 - DNA, 25 bp, Artificial
  probe
  misc_feature (1)..(25): SEQ ID NO: 7553; WAN024CPL; Start 168; Stop 192
cttggtagatataaggagttcctct

SEQ ID NO: 471121 - DNA, 25 bp, Artificial
  probe
  misc_feature (1)..(25): SEQ ID NO: 7553; WAN024CPL; Start 109; Stop 133
aatatcttctacttgatccagtgtt

SEQ ID NO: 471122 - DNA, 25 bp, Artificial
  probe
  misc_feature (1)..(25): SEQ ID NO: 7553; WAN024CPL; Start 158; Stop 182
atctcctcaccttggtagatataag

SEQ ID NO: 471123 - DNA, 25 bp, Artificial
  probe
  misc_feature (1)..(25): SEQ ID NO: 7553; WAN024CPL; Start 171; Stop 195
ggtagatataaggagttcctctcat

SEQ ID NO: 471124 - DNA, 25 bp, Artificial
  probe
  misc_feature (1)..(25): SEQ ID NO: 7553; WAN024CPL; Start 185; Stop 209
gttcctctcataagatgaagcaaga

SEQ ID NO: 471125 - DNA, 25 bp, Artificial
  probe
  misc_feature (1)..(25): SEQ ID NO: 7553; WAN024CPL; Start 184; Stop 208
agttcctctcataagatgaagcaag

SEQ ID NO: 471126 - DNA, 25 bp, Artificial
  probe
  misc_feature (1)..(25): SEQ ID NO: 7553; WAN024CPL; Start 183; Stop 207
gagttcctctcataagatgaagcaa

SEQ ID NO: 471127 - DNA, 25 bp, Artificial
  probe
  misc_feature (1)..(25): SEQ ID NO: 7553; WAN024CPL; Start 188; Stop 212
cctctcataagatgaagcaagattg

SEQ ID NO: 471128 - DNA, 25 bp, Artificial
  probe
  misc_feature (1)..(25): SEQ ID NO: 7553; WAN024CPL; Start 187; Stop 211
tcctctcataagatgaagcaagatt

SEQ ID NO: 471129 - DNA, 25 bp, Artificial
  probe
  misc_feature (1)..(25): SEQ ID NO: 7553; WAN024CPL; Start 186; Stop 210
ttcctctcataagatgaagcaagat

SEQ ID NO: 471130 - DNA, 25 bp, Artificial
  probe
  misc_feature (1)..(25): SEQ ID NO: 7553; WAN024CPL; Start 27; Stop 51
gtccaataacacggatactgtccat

SEQ ID NO: 471131 - DNA, 25 bp, Artificial
  probe
  misc_feature (1)..(25): SEQ ID NO: 7553; WAN024CPL; Start 157; Stop 181
aatctcctcaccttggtagatataa

SEQ ID NO: 471132 - DNA, 25 bp, Artificial
  probe
  misc_feature (1)..(25): SEQ ID NO: 7553; WAN024CPL; Start 112; Stop 136
atcttctacttgatccagtgtttca

SEQ ID NO: 471133 - DNA, 25 bp, Artificial
  probe
  misc_feature (1)..(25): SEQ ID NO: 7553; WAN024CPL; Start 130; Stop 154
tgtttcaaacggatagttggtcatc

SEQ ID NO: 471134 - DNA, 25 bp, Artificial
  probe
  misc_feature (1)..(25): SEQ ID NO: 7553; WAN024CPL; Start 180; Stop 204
aaggagttcctctcataagatgaag

SEQ ID NO: 471135 - DNA, 25 bp, Artificial
  probe
  misc_feature (1)..(25): SEQ ID NO: 7553; WAN024CPL; Start 29; Stop 53
ccaataacacggatactgtccatga

SEQ ID NO: 471136 - DNA, 25 bp, Artificial
  probe
  misc_feature (1)..(25): SEQ ID NO: 7553; WAN024CPL; Start 28; Stop 52
tccaataacacggatactgtccatg

SEQ ID NO: 471137 - DNA, 25 bp, Artificial
  probe
  misc_feature (1)..(25): SEQ ID NO: 7553; WAN024CPL; Start 129; Stop 153
gtgtttcaaacggatagttggtcat

SEQ ID NO: 471138 - DNA, 25 bp, Artificial
  probe
  misc_feature (1)..(25): SEQ ID NO: 7553; WAN024CPL; Start 182; Stop 206
ggagttcctctcataagatgaagca

SEQ ID NO: 471139 - DNA, 25 bp, Artificial
  probe
  misc_feature (1)..(25): SEQ ID NO: 7553; WAN024CPL; Start 91; Stop 115
cgcatagttgagagattcaatatct

SEQ ID NO: 471140 - DNA, 25 bp, Artificial
  probe
  misc_feature (1)..(25): SEQ ID NO: 7553; WAN024CPL; Start 50; Stop 74
atgatttcttcaatcggaacacctt

SEQ ID NO: 471141 - DNA, 25 bp, Artificial
  probe
  misc_feature (1)..(25): SEQ ID NO: 7553; WAN024CPL; Start 111; Stop 135
tatcttctacttgatccagtgtttc

SEQ ID NO: 471142 - DNA, 25 bp, Artificial
  probe
  misc_feature (1)..(25): SEQ ID NO: 7553; WAN024CPL; Start 51; Stop 75
tgatttcttcaatcggaacaccttt

SEQ ID NO: 471143 - DNA, 25 bp, Artificial
  probe
  misc_feature (1)..(25): SEQ ID NO: 7553; WAN024CPL; Start 181; Stop 205
aggagttcctctcataagatgaagc

SEQ ID NO: 471144 - DNA, 25 bp, Artificial
  probe
  misc_feature (1)..(25): SEQ ID NO: 7553; WAN024CPL; Start 179; Stop 203
taaggagttcctctcataagatgaa

SEQ ID NO: 471145 - DNA, 25 bp, Artificial
  probe
  misc_feature (1)..(25): SEQ ID NO: 7553; WAN024CPL; Start 32; Stop 56
ataacacggatactgtccatgattt

SEQ ID NO: 471146 - DNA, 25 bp, Artificial
  probe
  misc_feature (1)..(25): SEQ ID NO: 7553; WAN024CPL; Start 189; Stop 213
ctctcataagatgaagcaagattgc

SEQ ID NO: 471147 - DNA, 25 bp, Artificial
  probe
  misc_feature (1)..(25): SEQ ID NO: 7554; WAN024BOH; Start 21; Stop 45
agcatcttatatccacctttcttca

SEQ ID NO: 471148 - DNA, 25 bp, Artificial
  probe
  misc_feature (1)..(25): SEQ ID NO: 7554; WAN024BOH; Start 22; Stop 46
gcatcttatatccacctttcttcaa

SEQ ID NO: 471149 - DNA, 25 bp, Artificial
  probe
  misc_feature (1)..(25): SEQ ID NO: 7554; WAN024BOH; Start 20; Stop 44
aagcatcttatatccacctttcttc

SEQ ID NO: 471150 - DNA, 25 bp, Artificial
  probe
  misc_feature (1)..(25): SEQ ID NO: 7554; WAN024BOH; Start 27; Stop 51
ttatatccacctttcttcaaattcg

SEQ ID NO: 471151 - DNA, 25 bp, Artificial
  probe
  misc_feature (1)..(25): SEQ ID NO: 7554; WAN024BOH; Start 31; Stop 55
atccacctttcttcaaattcgattg

SEQ ID NO: 471152 - DNA, 25 bp, Artificial
  probe
  misc_feature (1)..(25): SEQ ID NO: 7554; WAN024BOH; Start 43; Stop 67
tcaaattcgattgttacagttggtt

SEQ ID NO: 471153 - DNA, 25 bp, Artificial
  probe
  misc_feature (1)..(25): SEQ ID NO: 7554; WAN024BOH; Start 42; Stop 66
ttcaaattcgattgttacagttggt

SEQ ID NO: 471154 - DNA, 25 bp, Artificial
  probe
  misc_feature (1)..(25): SEQ ID NO: 7554; WAN024BOH; Start 33; Stop 57
ccacctttcttcaaattcgattgtt

SEQ ID NO: 471155 - DNA, 25 bp, Artificial
  probe
  misc_feature (1)..(25): SEQ ID NO: 7554; WAN024BOH; Start 30; Stop 54
tatccacctttcttcaaattcgatt

SEQ ID NO: 471156 - DNA, 25 bp, Artificial
  probe
  misc_feature (1)..(25): SEQ ID NO: 7554; WAN024BOH; Start 41; Stop 65
cttcaaattcgattgttacagttgg

SEQ ID NO: 471157 - DNA, 25 bp, Artificial
  probe
  misc_feature (1)..(25): SEQ ID NO: 7554; WAN024BOH; Start 44; Stop 68
caaattcgattgttacagttggttt

SEQ ID NO: 471158 - DNA, 25 bp, Artificial
  probe
  misc_feature (1)..(25): SEQ ID NO: 7554; WAN024BOH; Start 29; Stop 53
atatccacctttcttcaaattcgat

SEQ ID NO: 471159 - DNA, 25 bp, Artificial
  probe
  misc_feature (1)..(25): SEQ ID NO: 7554; WAN024BOH; Start 32; Stop 56
tccacctttcttcaaattcgattgt

SEQ ID NO: 471160 - DNA, 25 bp, Artificial
  probe
  misc_feature (1)..(25): SEQ ID NO: 7554; WAN024BOH; Start 40; Stop 64
tcttcaaattcgattgttacagttg

SEQ ID NO: 471161 - DNA, 25 bp, Artificial
  probe
  misc_feature (1)..(25): SEQ ID NO: 7554; WAN024BOH; Start 36; Stop 60
cctttcttcaaattcgattgttaca

SEQ ID NO: 471162 - DNA, 25 bp, Artificial
  probe
  misc_feature (1)..(25): SEQ ID NO: 7554; WAN024BOH; Start 34; Stop 58
cacctttcttcaaattcgattgtta

SEQ ID NO: 471163 - DNA, 25 bp, Artificial
  probe
  misc_feature (1)..(25): SEQ ID NO: 7554; WAN024BOH; Start 28; Stop 52
tatatccacctttcttcaaattcga

SEQ ID NO: 471164 - DNA, 25 bp, Artificial
  probe
  misc_feature (1)..(25): SEQ ID NO: 7554; WAN024BOH; Start 23; Stop 47
catcttatatccacctttcttcaaa

SEQ ID NO: 471165 - DNA, 25 bp, Artificial
  probe
  misc_feature (1)..(25): SEQ ID NO: 7554; WAN024BOH; Start 35; Stop 59
acctttcttcaaattcgattgttac

SEQ ID NO: 471166 - DNA, 25 bp, Artificial
  probe
  misc_feature (1)..(25): SEQ ID NO: 7554; WAN024BOH; Start 14; Stop 38
tgtcaaaagcatcttatatccacct

SEQ ID NO: 471167 - DNA, 25 bp, Artificial
  probe
  misc_feature (1)..(25): SEQ ID NO: 7554; WAN024BOH; Start 19; Stop 43
aaagcatcttatatccacctttctt

SEQ ID NO: 471168 - DNA, 25 bp, Artificial
  probe
  misc_feature (1)..(25): SEQ ID NO: 7554; WAN024BOH; Start 13; Stop 37
ttgtcaaaagcatcttatatccacc

SEQ ID NO: 471169 - DNA, 25 bp, Artificial
  probe
  misc_feature (1)..(25): SEQ ID NO: 7554; WAN024BOH; Start 15; Stop 39
gtcaaaagcatcttatatccacctt

SEQ ID NO: 471170 - DNA, 25 bp, Artificial
  probe
  misc_feature (1)..(25): SEQ ID NO: 7554; WAN024BOH; Start 39; Stop 63
ttcttcaaattcgattgttacagtt

SEQ ID NO: 471171 - DNA, 25 bp, Artificial
  probe
  misc_feature (1)..(25): SEQ ID NO: 7554; WAN024BOH; Start 38; Stop 62
tttcttcaaattcgattgttacagt

SEQ ID NO: 471172 - DNA, 25 bp, Artificial
  probe
  misc_feature (1)..(25): SEQ ID NO: 7554; WAN024BOH; Start 37; Stop 61
ctttcttcaaattcgattgttacag

SEQ ID NO: 471173 - DNA, 25 bp, Artificial
  probe
  misc_feature (1)..(25): SEQ ID NO: 7554; WAN024BOH; Start 4; Stop 28
catcatggattgtcaaaagcatctt

SEQ ID NO: 471174 - DNA, 25 bp, Artificial
  probe
  misc_feature (1)..(25): SEQ ID NO: 7554; WAN024BOH; Start 25; Stop 49
tcttatatccacctttcttcaaatt

SEQ ID NO: 471175 - DNA, 25 bp, Artificial
  probe
  misc_feature (1)..(25): SEQ ID NO: 7554; WAN024BOH; Start 6; Stop 30
tcatggattgtcaaaagcatcttat

SEQ ID NO: 471176 - DNA, 25 bp, Artificial
  probe
  misc_feature (1)..(25): SEQ ID NO: 7554; WAN024BOH; Start 5; Stop 29
atcatggattgtcaaaagcatctta

SEQ ID NO: 471177 - DNA, 25 bp, Artificial
  probe
  misc_feature (1)..(25): SEQ ID NO: 7554; WAN024BOH; Start 26; Stop 50
cttatatccacctttcttcaaattc

SEQ ID NO: 471178 - DNA, 25 bp, Artificial
  probe
  misc_feature (1)..(25): SEQ ID NO: 7554; WAN024BOH; Start 24; Stop 48
atcttatatccacctttcttcaaat

SEQ ID NO: 471179 - DNA, 25 bp, Artificial
  probe
  misc_feature (1)..(25): SEQ ID NO: 7554; WAN024BOH; Start 12; Stop 36
attgtcaaaagcatcttatatccac

SEQ ID NO: 471180 - DNA, 25 bp, Artificial
  probe
  misc_feature (1)..(25): SEQ ID NO: 7555; WAN024GCB; Start 4; Stop 28
catcttccttctctcaacgaatcat

SEQ ID NO: 471181 - DNA, 25 bp, Artificial
  probe
  misc_feature (1)..(25): SEQ ID NO: 7555; WAN024GCB; Start 35; Stop 59
tatctaaccatgtcaggatcgtagt

SEQ ID NO: 471182 - DNA, 25 bp, Artificial
  probe
  misc_feature (1)..(25): SEQ ID NO: 7555; WAN024GCB; Start 34; Stop 58
ttatctaaccatgtcaggatcgtag

SEQ ID NO: 471183 - DNA, 25 bp, Artificial
  probe
  misc_feature (1)..(25): SEQ ID NO: 7555; WAN024GCB; Start 9; Stop 33
tccttctctcaacgaatcatgtatt

SEQ ID NO: 471184 - DNA, 25 bp, Artificial
  probe
  misc_feature (1)..(25): SEQ ID NO: 7555; WAN024GCB; Start 8; Stop 32
ttccttctctcaacgaatcatgtat

SEQ ID NO: 471185 - DNA, 25 bp, Artificial
  probe
  misc_feature (1)..(25): SEQ ID NO: 7555; WAN024GCB; Start 7; Stop 31
cttccttctctcaacgaatcatgta

SEQ ID NO: 471186 - DNA, 25 bp, Artificial
  probe
  misc_feature (1)..(25): SEQ ID NO: 7555; WAN024GCB; Start 39; Stop 63
taaccatgtcaggatcgtagtcata

SEQ ID NO: 471187 - DNA, 25 bp, Artificial
  probe
  misc_feature (1)..(25): SEQ ID NO: 7555; WAN024GCB; Start 5; Stop 29
atcttccttctctcaacgaatcatg

SEQ ID NO: 471188 - DNA, 25 bp, Artificial
  probe
  misc_feature (1)..(25): SEQ ID NO: 7555; WAN024GCB; Start 36; Stop 60
atctaaccatgtcaggatcgtagtc

SEQ ID NO: 471189 - DNA, 25 bp, Artificial
  probe
  misc_feature (1)..(25): SEQ ID NO: 7555; WAN024GCB; Start 40; Stop 64
aaccatgtcaggatcgtagtcataa

SEQ ID NO: 471190 - DNA, 25 bp, Artificial
  probe
  misc_feature (1)..(25): SEQ ID NO: 7555; WAN024GCB; Start 38; Stop 62
ctaaccatgtcaggatcgtagtcat

SEQ ID NO: 471191 - DNA, 25 bp, Artificial
  probe
  misc_feature (1)..(25): SEQ ID NO: 7555; WAN024GCB; Start 6; Stop 30
tcttccttctctcaacgaatcatgt

SEQ ID NO: 471192 - DNA, 25 bp, Artificial
  probe
  misc_feature (1)..(25): SEQ ID NO: 7555; WAN024GCB; Start 3; Stop 27
gcatcttccttctctcaacgaatca

SEQ ID NO: 471193 - DNA, 25 bp, Artificial
  probe
  misc_feature (1)..(25): SEQ ID NO: 7555; WAN024GCB; Start 37; Stop 61
tctaaccatgtcaggatcgtagtca

SEQ ID NO: 471194 - DNA, 25 bp, Artificial
  probe
  misc_feature (1)..(25): SEQ ID NO: 7555; WAN024GCB; Start 136; Stop 160
atgactaaagttgccctcttgaatc

SEQ ID NO: 471195 - DNA, 25 bp, Artificial
  probe
  misc_feature (1)..(25): SEQ ID NO: 7555; WAN024GCB; Start 100; Stop 124
tttacgaacttcttcatccagcaag

SEQ ID NO: 471196 - DNA, 25 bp, Artificial
  probe
  misc_feature (1)..(25): SEQ ID NO: 7555; WAN024GCB; Start 33; Stop 57
tttatctaaccatgtcaggatcgta

SEQ ID NO: 471197 - DNA, 25 bp, Artificial
  probe
  misc_feature (1)..(25): SEQ ID NO: 7555; WAN024GCB; Start 99; Stop 123
gtttacgaacttcttcatccagcaa

SEQ ID NO: 471198 - DNA, 25 bp, Artificial
  probe
  misc_feature (1)..(25): SEQ ID NO: 7555; WAN024GCB; Start 10; Stop 34
ccttctctcaacgaatcatgtattt

SEQ ID NO: 471199 - DNA, 25 bp, Artificial
  probe
  misc_feature (1)..(25): SEQ ID NO: 7555; WAN024GCB; Start 138; Stop 162
gactaaagttgccctcttgaatcaa

SEQ ID NO: 471200 - DNA, 25 bp, Artificial
  probe
  misc_feature (1)..(25): SEQ ID NO: 7555; WAN024GCB; Start 135; Stop 159
catgactaaagttgccctcttgaat

SEQ ID NO: 471201 - DNA, 25 bp, Artificial
  probe
  misc_feature (1)..(25): SEQ ID NO: 7555; WAN024GCB; Start 41; Stop 65
accatgtcaggatcgtagtcataaa

SEQ ID NO: 471202 - DNA, 25 bp, Artificial
  probe
  misc_feature (1)..(25): SEQ ID NO: 7555; WAN024GCB; Start 190; Stop 214
aatctcaacaaagttctgaccagga

SEQ ID NO: 471203 - DNA, 25 bp, Artificial
  probe
  misc_feature (1)..(25): SEQ ID NO: 7555; WAN024GCB; Start 189; Stop 213
caatctcaacaaagttctgaccagg

SEQ ID NO: 471204 - DNA, 25 bp, Artificial
  probe
  misc_feature (1)..(25): SEQ ID NO: 7555; WAN024GCB; Start 137; Stop 161
tgactaaagttgccctcttgaatca

SEQ ID NO: 471205 - DNA, 25 bp, Artificial
  probe
  misc_feature (1)..(25): SEQ ID NO: 7555; WAN024GCB; Start 101; Stop 125
ttacgaacttcttcatccagcaaga

SEQ ID NO: 471206 - DNA, 25 bp, Artificial
  probe
  misc_feature (1)..(25): SEQ ID NO: 7555; WAN024GCB; Start 1; Stop 25
ttgcatcttccttctctcaacgaat

SEQ ID NO: 471207 - DNA, 25 bp, Artificial
  probe
  misc_feature (1)..(25): SEQ ID NO: 7555; WAN024GCB; Start 198; Stop 222
caaagttctgaccaggagtgtagag

SEQ ID NO: 471208 - DNA, 25 bp, Artificial
  probe
  misc_feature (1)..(25): SEQ ID NO: 7555; WAN024GCB; Start 2; Stop 26
tgcatcttccttctctcaacgaatc

SEQ ID NO: 471209 - DNA, 25 bp, Artificial
  probe
  misc_feature (1)..(25): SEQ ID NO: 7555; WAN024GCB; Start 191; Stop 215
atctcaacaaagttctgaccaggag

SEQ ID NO: 471210 - DNA, 25 bp, Artificial
  probe
  misc_feature (1)..(25): SEQ ID NO: 7555; WAN024GCB; Start 188; Stop 212
gcaatctcaacaaagttctgaccag

SEQ ID NO: 471211 - DNA, 25 bp, Artificial
  probe
  misc_feature (1)..(25): SEQ ID NO: 7555; WAN024GCB; Start 196; Stop 220
aacaaagttctgaccaggagtgtag

SEQ ID NO: 471212 - DNA, 25 bp, Artificial
  probe
  misc_feature (1)..(25): SEQ ID NO: 7555; WAN024GCB; Start 124; Stop 148
gaaggcttgagcatgactaaagttg

SEQ ID NO: 471213 - DNA, 25 bp, Artificial
  probe
  misc_feature (1)..(25): SEQ ID NO: 7556; WAN024CQI; Start 170; Stop 194
atatgaagaactgtgtaaggaaggc

SEQ ID NO: 471214 - DNA, 25 bp, Artificial
  probe
  misc_feature (1)..(25): SEQ ID NO: 7556; WAN024CQI; Start 198; Stop 222
tctcattattgtaattgccttgtgt

SEQ ID NO: 471215 - DNA, 25 bp, Artificial
  probe
  misc_feature (1)..(25): SEQ ID NO: 7556; WAN024CQI; Start 199; Stop 223
ctcattattgtaattgccttgtgtt

SEQ ID NO: 471216 - DNA, 25 bp, Artificial
  probe
  misc_feature (1)..(25): SEQ ID NO: 7556; WAN024CQI; Start 197; Stop 221
atctcattattgtaattgccttgtg

SEQ ID NO: 471217 - DNA, 25 bp, Artificial
  probe
  misc_feature (1)..(25): SEQ ID NO: 7556; WAN024CQI; Start 193; Stop 217
gccaatctcattattgtaattgcct

SEQ ID NO: 471218 - DNA, 25 bp, Artificial
  probe
  misc_feature (1)..(25): SEQ ID NO: 7556; WAN024CQI; Start 196; Stop 220
aatctcattattgtaattgccttgt

SEQ ID NO: 471219 - DNA, 25 bp, Artificial
  probe
  misc_feature (1)..(25): SEQ ID NO: 7556; WAN024CQI; Start 8; Stop 32
tttcctttagcaatctcagaacgat

SEQ ID NO: 471220 - DNA, 25 bp, Artificial
  probe
  misc_feature (1)..(25): SEQ ID NO: 7556; WAN024CQI; Start 168; Stop 192
gcatatgaagaactgtgtaaggaag

SEQ ID NO: 471221 - DNA, 25 bp, Artificial
  probe
  misc_feature (1)..(25): SEQ ID NO: 7556; WAN024CQI; Start 169; Stop 193
catatgaagaactgtgtaaggaagg

SEQ ID NO: 471222 - DNA, 25 bp, Artificial
  probe
  misc_feature (1)..(25): SEQ ID NO: 7556; WAN024CQI; Start 167; Stop 191
ggcatatgaagaactgtgtaaggaa

SEQ ID NO: 471223 - DNA, 25 bp, Artificial
  probe
  misc_feature (1)..(25): SEQ ID NO: 7556; WAN024CQI; Start 108; Stop 132
gatgaatatctcccaagtgatcctg

SEQ ID NO: 471224 - DNA, 25 bp, Artificial
  probe
  misc_feature (1)..(25): SEQ ID NO: 7556; WAN024CQI; Start 109; Stop 133
atgaatatctcccaagtgatcctgt

SEQ ID NO: 471225 - DNA, 25 bp, Artificial
  probe
  misc_feature (1)..(25): SEQ ID NO: 7556; WAN024CQI; Start 12; Stop 36
ctttagcaatctcagaacgatcttt

SEQ ID NO: 471226 - DNA, 25 bp, Artificial
  probe
  misc_feature (1)..(25): SEQ ID NO: 7556; WAN024CQI; Start 13; Stop 37
tttagcaatctcagaacgatctttg

SEQ ID NO: 471227 - DNA, 25 bp, Artificial
  probe
  misc_feature (1)..(25): SEQ ID NO: 7556; WAN024CQI; Start 9; Stop 33
ttcctttagcaatctcagaacgatc

SEQ ID NO: 471228 - DNA, 25 bp, Artificial
  probe
  misc_feature (1)..(25): SEQ ID NO: 7556; WAN024CQI; Start 166; Stop 190
aggcatatgaagaactgtgtaagga

SEQ ID NO: 471229 - DNA, 25 bp, Artificial
  probe
  misc_feature (1)..(25): SEQ ID NO: 7556; WAN024CQI; Start 11; Stop 35
cctttagcaatctcagaacgatctt

SEQ ID NO: 471230 - DNA, 25 bp, Artificial
  probe
  misc_feature (1)..(25): SEQ ID NO: 7556; WAN024CQI; Start 15; Stop 39
tagcaatctcagaacgatctttgaa

SEQ ID NO: 471231 - DNA, 25 bp, Artificial
  probe
  misc_feature (1)..(25): SEQ ID NO: 7556; WAN024CQI; Start 14; Stop 38
ttagcaatctcagaacgatctttga

SEQ ID NO: 471232 - DNA, 25 bp, Artificial
  probe
  misc_feature (1)..(25): SEQ ID NO: 7556; WAN024CQI; Start 183; Stop 207
tgtaaggaaggccaatctcattatt

SEQ ID NO: 471233 - DNA, 25 bp, Artificial
  probe
  misc_feature (1)..(25): SEQ ID NO: 7556; WAN024CQI; Start 16; Stop 40
agcaatctcagaacgatctttgaaa

SEQ ID NO: 471234 - DNA, 25 bp, Artificial
  probe
  misc_feature (1)..(25): SEQ ID NO: 7556; WAN024CQI; Start 110; Stop 134
tgaatatctcccaagtgatcctgtc

SEQ ID NO: 471235 - DNA, 25 bp, Artificial
  probe
  misc_feature (1)..(25): SEQ ID NO: 7556; WAN024CQI; Start 182; Stop 206
gtgtaaggaaggccaatctcattat

SEQ ID NO: 471236 - DNA, 25 bp, Artificial
  probe
  misc_feature (1)..(25): SEQ ID NO: 7556; WAN024CQI; Start 194; Stop 218
ccaatctcattattgtaattgcctt

SEQ ID NO: 471237 - DNA, 25 bp, Artificial
  probe
  misc_feature (1)..(25): SEQ ID NO: 7556; WAN024CQI; Start 10; Stop 34
tcctttagcaatctcagaacgatct

SEQ ID NO: 471238 - DNA, 25 bp, Artificial
  probe
  misc_feature (1)..(25): SEQ ID NO: 7556; WAN024CQI; Start 164; Stop 188
tcaggcatatgaagaactgtgtaag

SEQ ID NO: 471239 - DNA, 25 bp, Artificial
  probe
  misc_feature (1)..(25): SEQ ID NO: 7556; WAN024CQI; Start 200; Stop 224
tcattattgtaattgccttgtgttt

SEQ ID NO: 471240 - DNA, 25 bp, Artificial
  probe
  misc_feature (1)..(25): SEQ ID NO: 7556; WAN024CQI; Start 87; Stop 111
gacgagccaattcagacaagagatg

SEQ ID NO: 471241 - DNA, 25 bp, Artificial
  probe
  misc_feature (1)..(25): SEQ ID NO: 7556; WAN024CQI; Start 165; Stop 189
caggcatatgaagaactgtgtaagg

SEQ ID NO: 471242 - DNA, 25 bp, Artificial
  probe
  misc_feature (1)..(25): SEQ ID NO: 7556; WAN024CQI; Start 111; Stop 135
gaatatctcccaagtgatcctgtcc

SEQ ID NO: 471243 - DNA, 25 bp, Artificial
  probe
  misc_feature (1)..(25): SEQ ID NO: 7556; WAN024CQI; Start 181; Stop 205
tgtgtaaggaaggccaatctcatta

SEQ ID NO: 471244 - DNA, 25 bp, Artificial
  probe
  misc_feature (1)..(25): SEQ ID NO: 7556; WAN024CQI; Start 195; Stop 219
caatctcattattgtaattgccttg

SEQ ID NO: 471245 - DNA, 25 bp, Artificial
  probe
  misc_feature (1)..(25): SEQ ID NO: 7556; WAN024CQI; Start 171; Stop 195
tatgaagaactgtgtaaggaaggcc

SEQ ID NO: 471246 - DNA, 25 bp, Artificial
  probe
  misc_feature (1)..(25): SEQ ID NO: 7557; WAN024FFP; Start 145; Stop 169
ttctgtatgatgaagaggtcaatct

SEQ ID NO: 471247 - DNA, 25 bp, Artificial
  probe
  misc_feature (1)..(25): SEQ ID NO: 7557; WAN024FFP; Start 194; Stop 218
ccaaggaagaaagaagaaagcaatc

SEQ ID NO: 471248 - DNA, 25 bp, Artificial
  probe
  misc_feature (1)..(25): SEQ ID NO: 7557; WAN024FFP; Start 41; Stop 65
taatccaaagagaaagacagcagat

SEQ ID NO: 471249 - DNA, 25 bp, Artificial
  probe
  misc_feature (1)..(25): SEQ ID NO: 7557; WAN024FFP; Start 40; Stop 64
ttaatccaaagagaaagacagcaga

SEQ ID NO: 471250 - DNA, 25 bp, Artificial
  probe
  misc_feature (1)..(25): SEQ ID NO: 7557; WAN024FFP; Start 39; Stop 63
gttaatccaaagagaaagacagcag

SEQ ID NO: 471251 - DNA, 25 bp, Artificial
  probe
  misc_feature (1)..(25): SEQ ID NO: 7557; WAN024FFP; Start 136; Stop 160
agcaagactttctgtatgatgaaga

SEQ ID NO: 471252 - DNA, 25 bp, Artificial
  probe
  misc_feature (1)..(25): SEQ ID NO: 7557; WAN024FFP; Start 137; Stop 161
gcaagactttctgtatgatgaagag

SEQ ID NO: 471253 - DNA, 25 bp, Artificial
  probe
  misc_feature (1)..(25): SEQ ID NO: 7557; WAN024FFP; Start 139; Stop 163
aagactttctgtatgatgaagaggt

SEQ ID NO: 471254 - DNA, 25 bp, Artificial
  probe
  misc_feature (1)..(25): SEQ ID NO: 7557; WAN024FFP; Start 138; Stop 162
caagactttctgtatgatgaagagg

SEQ ID NO: 471255 - DNA, 25 bp, Artificial
  probe
  misc_feature (1)..(25): SEQ ID NO: 7557; WAN024FFP; Start 142; Stop 166
actttctgtatgatgaagaggtcaa

SEQ ID NO: 471256 - DNA, 25 bp, Artificial
  probe
  misc_feature (1)..(25): SEQ ID NO: 7557; WAN024FFP; Start 193; Stop 217
cccaaggaagaaagaagaaagcaat

SEQ ID NO: 471257 - DNA, 25 bp, Artificial
  probe
  misc_feature (1)..(25): SEQ ID NO: 7557; WAN024FFP; Start 46; Stop 70
caaagagaaagacagcagatcaatc

SEQ ID NO: 471258 - DNA, 25 bp, Artificial
  probe
  misc_feature (1)..(25): SEQ ID NO: 7557; WAN024FFP; Start 133; Stop 157
actagcaagactttctgtatgatga

SEQ ID NO: 471259 - DNA, 25 bp, Artificial
  probe
  misc_feature (1)..(25): SEQ ID NO: 7557; WAN024FFP; Start 146; Stop 170
tctgtatgatgaagaggtcaatctt

SEQ ID NO: 471260 - DNA, 25 bp, Artificial
  probe
  misc_feature (1)..(25): SEQ ID NO: 7557; WAN024FFP; Start 135; Stop 159
tagcaagactttctgtatgatgaag

SEQ ID NO: 471261 - DNA, 25 bp, Artificial
  probe
  misc_feature (1)..(25): SEQ ID NO: 7557; WAN024FFP; Start 47; Stop 71
aaagagaaagacagcagatcaatcc

SEQ ID NO: 471262 - DNA, 25 bp, Artificial
  probe
  misc_feature (1)..(25): SEQ ID NO: 7557; WAN024FFP; Start 132; Stop 156
aactagcaagactttctgtatgatg

SEQ ID NO: 471263 - DNA, 25 bp, Artificial
  probe
  misc_feature (1)..(25): SEQ ID NO: 7557; WAN024FFP; Start 42; Stop 66
aatccaaagagaaagacagcagatc

SEQ ID NO: 471264 - DNA, 25 bp, Artificial
  probe
  misc_feature (1)..(25): SEQ ID NO: 7557; WAN024FFP; Start 144; Stop 168
tttctgtatgatgaagaggtcaatc

SEQ ID NO: 471265 - DNA, 25 bp, Artificial
  probe
  misc_feature (1)..(25): SEQ ID NO: 7557; WAN024FFP; Start 143; Stop 167
ctttctgtatgatgaagaggtcaat

SEQ ID NO: 471266 - DNA, 25 bp, Artificial
  probe
  misc_feature (1)..(25): SEQ ID NO: 7557; WAN024FFP; Start 141; Stop 165
gactttctgtatgatgaagaggtca

SEQ ID NO: 471267 - DNA, 25 bp, Artificial
  probe
  misc_feature (1)..(25): SEQ ID NO: 7557; WAN024FFP; Start 140; Stop 164
agactttctgtatgatgaagaggtc

SEQ ID NO: 471268 - DNA, 25 bp, Artificial
  probe
  misc_feature (1)..(25): SEQ ID NO: 7557; WAN024FFP; Start 50; Stop 74
gagaaagacagcagatcaatccaaa

SEQ ID NO: 471269 - DNA, 25 bp, Artificial
  probe
  misc_feature (1)..(25): SEQ ID NO: 7557; WAN024FFP; Start 45; Stop 69
ccaaagagaaagacagcagatcaat

SEQ ID NO: 471270 - DNA, 25 bp, Artificial
  probe
  misc_feature (1)..(25): SEQ ID NO: 7557; WAN024FFP; Start 134; Stop 158
ctagcaagactttctgtatgatgaa

SEQ ID NO: 471271 - DNA, 25 bp, Artificial
  probe
  misc_feature (1)..(25): SEQ ID NO: 7557; WAN024FFP; Start 131; Stop 155
aaactagcaagactttctgtatgat

SEQ ID NO: 471272 - DNA, 25 bp, Artificial
  probe
  misc_feature (1)..(25): SEQ ID NO: 7557; WAN024FFP; Start 49; Stop 73
agagaaagacagcagatcaatccaa

SEQ ID NO: 471273 - DNA, 25 bp, Artificial
  probe
  misc_feature (1)..(25): SEQ ID NO: 7557; WAN024FFP; Start 48; Stop 72
aagagaaagacagcagatcaatcca

SEQ ID NO: 471274 - DNA, 25 bp, Artificial
  probe
  misc_feature (1)..(25): SEQ ID NO: 7557; WAN024FFP; Start 195; Stop 219
caaggaagaaagaagaaagcaatcc

SEQ ID NO: 471275 - DNA, 25 bp, Artificial
  probe
  misc_feature (1)..(25): SEQ ID NO: 7557; WAN024FFP; Start 43; Stop 67
atccaaagagaaagacagcagatca

SEQ ID NO: 471276 - DNA, 25 bp, Artificial
  probe
  misc_feature (1)..(25): SEQ ID NO: 7557; WAN024FFP; Start 196; Stop 220
aaggaagaaagaagaaagcaatcca

SEQ ID NO: 471277 - DNA, 25 bp, Artificial
  probe
  misc_feature (1)..(25): SEQ ID NO: 7557; WAN024FFP; Start 44; Stop 68
tccaaagagaaagacagcagatcaa

SEQ ID NO: 471278 - DNA, 25 bp, Artificial
  probe
  misc_feature (1)..(25): SEQ ID NO: 7557; WAN024FFP; Start 197; Stop 221
aggaagaaagaagaaagcaatccag

SEQ ID NO: 471279 - DNA, 25 bp, Artificial
  probe
  misc_feature (1)..(25): SEQ ID NO: 7558; WAN024C65; Start 6; Stop 30
aagattgactgaccttctcctgtct

SEQ ID NO: 471280 - DNA, 25 bp, Artificial
  probe
  misc_feature (1)..(25): SEQ ID NO: 7558; WAN024C65; Start 5; Stop 29
caagattgactgaccttctcctgtc

SEQ ID NO: 471281 - DNA, 25 bp, Artificial
  probe
  misc_feature (1)..(25): SEQ ID NO: 7558; WAN024C65; Start 9; Stop 33
attgactgaccttctcctgtctgag

SEQ ID NO: 471282 - DNA, 25 bp, Artificial
  probe
  misc_feature (1)..(25): SEQ ID NO: 7558; WAN024C65; Start 8; Stop 32
gattgactgaccttctcctgtctga

SEQ ID NO: 471283 - DNA, 25 bp, Artificial
  probe
  misc_feature (1)..(25): SEQ ID NO: 7558; WAN024C65; Start 7; Stop 31
agattgactgaccttctcctgtctg

SEQ ID NO: 471284 - DNA, 25 bp, Artificial
  probe
  misc_feature (1)..(25): SEQ ID NO: 7558; WAN024C65; Start 4; Stop 28
ccaagattgactgaccttctcctgt

SEQ ID NO: 471285 - DNA, 25 bp, Artificial
  probe
  misc_feature (1)..(25): SEQ ID NO: 7558; WAN024C65; Start 51; Stop 75
gaatggttcttttcctcttcagatt

SEQ ID NO: 471286 - DNA, 25 bp, Artificial
  probe
  misc_feature (1)..(25): SEQ ID NO: 7558; WAN024C65; Start 50; Stop 74
cgaatggttcttttcctcttcagat

SEQ ID NO: 471287 - DNA, 25 bp, Artificial
  probe
  misc_feature (1)..(25): SEQ ID NO: 7558; WAN024C65; Start 53; Stop 77
atggttcttttcctcttcagatttt

SEQ ID NO: 471288 - DNA, 25 bp, Artificial
  probe
  misc_feature (1)..(25): SEQ ID NO: 7558; WAN024C65; Start 52; Stop 76
aatggttcttttcctcttcagattt

SEQ ID NO: 471289 - DNA, 25 bp, Artificial
  probe
  misc_feature (1)..(25): SEQ ID NO: 7558; WAN024C65; Start 87; Stop 111
tttgaattctgtacttgtggctgag

SEQ ID NO: 471290 - DNA, 25 bp, Artificial
  probe
  misc_feature (1)..(25): SEQ ID NO: 7558; WAN024C65; Start 40; Stop 64
tcttttgatccgaatggttcttttc

SEQ ID NO: 471291 - DNA, 25 bp, Artificial
  probe
  misc_feature (1)..(25): SEQ ID NO: 7558; WAN024C65; Start 39; Stop 63
ttcttttgatccgaatggttctttt

SEQ ID NO: 471292 - DNA, 25 bp, Artificial
  probe
  misc_feature (1)..(25): SEQ ID NO: 7558; WAN024C65; Start 1; Stop 25
ttgccaagattgactgaccttctcc

SEQ ID NO: 471293 - DNA, 25 bp, Artificial
  probe
  misc_feature (1)..(25): SEQ ID NO: 7558; WAN024C65; Start 41; Stop 65
cttttgatccgaatggttcttttcc

SEQ ID NO: 471294 - DNA, 25 bp, Artificial
  probe
  misc_feature (1)..(25): SEQ ID NO: 7558; WAN024C65; Start 25; Stop 49
ctgtctgagggagattcttttgatc

SEQ ID NO: 471295 - DNA, 25 bp, Artificial
  probe
  misc_feature (1)..(25): SEQ ID NO: 7558; WAN024C65; Start 42; Stop 66
ttttgatccgaatggttcttttcct

SEQ ID NO: 471296 - DNA, 25 bp, Artificial
  probe
  misc_feature (1)..(25): SEQ ID NO: 7558; WAN024C65; Start 88; Stop 112
ttgaattctgtacttgtggctgagc

SEQ ID NO: 471297 - DNA, 25 bp, Artificial
  probe
  misc_feature (1)..(25): SEQ ID NO: 7558; WAN024C65; Start 47; Stop 71
atccgaatggttcttttcctcttca

SEQ ID NO: 471298 - DNA, 25 bp, Artificial
  probe
  misc_feature (1)..(25): SEQ ID NO: 7558; WAN024C65; Start 43; Stop 67
tttgatccgaatggttcttttcctc

SEQ ID NO: 471299 - DNA, 25 bp, Artificial
  probe
  misc_feature (1)..(25): SEQ ID NO: 7558; WAN024C65; Start 46; Stop 70
gatccgaatggttcttttcctcttc

SEQ ID NO: 471300 - DNA, 25 bp, Artificial
  probe
  misc_feature (1)..(25): SEQ ID NO: 7558; WAN024C65; Start 90; Stop 114
gaattctgtacttgtggctgagctg

SEQ ID NO: 471301 - DNA, 25 bp, Artificial
  probe
  misc_feature (1)..(25): SEQ ID NO: 7558; WAN024C65; Start 45; Stop 69
tgatccgaatggttcttttcctctt

SEQ ID NO: 471302 - DNA, 25 bp, Artificial
  probe
  misc_feature (1)..(25): SEQ ID NO: 7558; WAN024C65; Start 44; Stop 68
ttgatccgaatggttcttttcctct

SEQ ID NO: 471303 - DNA, 25 bp, Artificial
  probe
  misc_feature (1)..(25): SEQ ID NO: 7558; WAN024C65; Start 3; Stop 27
gccaagattgactgaccttctcctg

SEQ ID NO: 471304 - DNA, 25 bp, Artificial
  probe
  misc_feature (1)..(25): SEQ ID NO: 7558; WAN024C65; Start 37; Stop 61
gattcttttgatccgaatggttctt

SEQ ID NO: 471305 - DNA, 25 bp, Artificial
  probe
  misc_feature (1)..(25): SEQ ID NO: 7558; WAN024C65; Start 35; Stop 59
gagattcttttgatccgaatggttc

SEQ ID NO: 471306 - DNA, 25 bp, Artificial
  probe
  misc_feature (1)..(25): SEQ ID NO: 7558; WAN024C65; Start 48; Stop 72
tccgaatggttcttttcctcttcag

SEQ ID NO: 471307 - DNA, 25 bp, Artificial
  probe
  misc_feature (1)..(25): SEQ ID NO: 7558; WAN024C65; Start 36; Stop 60
agattcttttgatccgaatggttct

SEQ ID NO: 471308 - DNA, 25 bp, Artificial
  probe
  misc_feature (1)..(25): SEQ ID NO: 7558; WAN024C65; Start 38; Stop 62
attcttttgatccgaatggttcttt

SEQ ID NO: 471309 - DNA, 25 bp, Artificial
  probe
  misc_feature (1)..(25): SEQ ID NO: 7558; WAN024C65; Start 49; Stop 73
ccgaatggttcttttcctcttcaga

SEQ ID NO: 471310 - DNA, 25 bp, Artificial
  probe
  misc_feature (1)..(25): SEQ ID NO: 7558; WAN024C65; Start 24; Stop 48
cctgtctgagggagattcttttgat

SEQ ID NO: 471311 - DNA, 25 bp, Artificial
  probe
  misc_feature (1)..(25): SEQ ID NO: 7558; WAN024C65; Start 34; Stop 58
ggagattcttttgatccgaatggtt

SEQ ID NO: 471312 - DNA, 25 bp, Artificial
  probe
  misc_feature (1)..(25): SEQ ID NO: 7559; WAN024FIR; Start 124; Stop 148
ttacaaagtcaagcaaagccaagaa

SEQ ID NO: 471313 - DNA, 25 bp, Artificial
  probe
  misc_feature (1)..(25): SEQ ID NO: 7559; WAN024FIR; Start 123; Stop 147
tttacaaagtcaagcaaagccaaga

SEQ ID NO: 471314 - DNA, 25 bp, Artificial
  probe
  misc_feature (1)..(25): SEQ ID NO: 7559; WAN024FIR; Start 125; Stop 149
tacaaagtcaagcaaagccaagaag

SEQ ID NO: 471315 - DNA, 25 bp, Artificial
  probe
  misc_feature (1)..(25): SEQ ID NO: 7559; WAN024FIR; Start 77; Stop 101
gacatctgaatgctgttccacctag

SEQ ID NO: 471316 - DNA, 25 bp, Artificial
  probe
  misc_feature (1)..(25): SEQ ID NO: 7559; WAN024FIR; Start 76; Stop 100
agacatctgaatgctgttccaccta

SEQ ID NO: 471317 - DNA, 25 bp, Artificial
  probe
  misc_feature (1)..(25): SEQ ID NO: 7559; WAN024FIR; Start 13; Stop 37
gtaaacagatacttgctaatccaat

SEQ ID NO: 471318 - DNA, 25 bp, Artificial
  probe
  misc_feature (1)..(25): SEQ ID NO: 7559; WAN024FIR; Start 8; Stop 32
gcctagtaaacagatacttgctaat

SEQ ID NO: 471319 - DNA, 25 bp, Artificial
  probe
  misc_feature (1)..(25): SEQ ID NO: 7559; WAN024FIR; Start 15; Stop 39
aaacagatacttgctaatccaattt

SEQ ID NO: 471320 - DNA, 25 bp, Artificial
  probe
  misc_feature (1)..(25): SEQ ID NO: 7559; WAN024FIR; Start 2; Stop 26
tgccaagcctagtaaacagatactt

SEQ ID NO: 471321 - DNA, 25 bp, Artificial
  probe
  misc_feature (1)..(25): SEQ ID NO: 7559; WAN024FIR; Start 1; Stop 25
ttgccaagcctagtaaacagatact

SEQ ID NO: 471322 - DNA, 25 bp, Artificial
  probe
  misc_feature (1)..(25): SEQ ID NO: 7559; WAN024FIR; Start 7; Stop 31
agcctagtaaacagatacttgctaa

SEQ ID NO: 471323 - DNA, 25 bp, Artificial
  probe
  misc_feature (1)..(25): SEQ ID NO: 7559; WAN024FIR; Start 6; Stop 30
aagcctagtaaacagatacttgcta

SEQ ID NO: 471324 - DNA, 25 bp, Artificial
  probe
  misc_feature (1)..(25): SEQ ID NO: 7559; WAN024FIR; Start 12; Stop 36
agtaaacagatacttgctaatccaa

SEQ ID NO: 471325 - DNA, 25 bp, Artificial
  probe
  misc_feature (1)..(25): SEQ ID NO: 7559; WAN024FIR; Start 120; Stop 144
tattttacaaagtcaagcaaagcca

SEQ ID NO: 471326 - DNA, 25 bp, Artificial
  probe
  misc_feature (1)..(25): SEQ ID NO: 7559; WAN024FIR; Start 121; Stop 145
attttacaaagtcaagcaaagccaa

SEQ ID NO: 471327 - DNA, 25 bp, Artificial
  probe
  misc_feature (1)..(25): SEQ ID NO: 7559; WAN024FIR; Start 119; Stop 143
ttattttacaaagtcaagcaaagcc

SEQ ID NO: 471328 - DNA, 25 bp, Artificial
  probe
  misc_feature (1)..(25): SEQ ID NO: 7559; WAN024FIR; Start 122; Stop 146
ttttacaaagtcaagcaaagccaag

SEQ ID NO: 471329 - DNA, 25 bp, Artificial
  probe
  misc_feature (1)..(25): SEQ ID NO: 7559; WAN024FIR; Start 67; Stop 91
aaatgtaacagacatctgaatgctg

SEQ ID NO: 471330 - DNA, 25 bp, Artificial
  probe
  misc_feature (1)..(25): SEQ ID NO: 7559; WAN024FIR; Start 14; Stop 38
taaacagatacttgctaatccaatt

SEQ ID NO: 471331 - DNA, 25 bp, Artificial
  probe
  misc_feature (1)..(25): SEQ ID NO: 7559; WAN024FIR; Start 68; Stop 92
aatgtaacagacatctgaatgctgt

SEQ ID NO: 471332 - DNA, 25 bp, Artificial
  probe
  misc_feature (1)..(25): SEQ ID NO: 7559; WAN024FIR; Start 11; Stop 35
tagtaaacagatacttgctaatcca

SEQ ID NO: 471333 - DNA, 25 bp, Artificial
  probe
  misc_feature (1)..(25): SEQ ID NO: 7559; WAN024FIR; Start 5; Stop 29
caagcctagtaaacagatacttgct

SEQ ID NO: 471334 - DNA, 25 bp, Artificial
  probe
  misc_feature (1)..(25): SEQ ID NO: 7559; WAN024FIR; Start 10; Stop 34
ctagtaaacagatacttgctaatcc

SEQ ID NO: 471335 - DNA, 25 bp, Artificial
  probe
  misc_feature (1)..(25): SEQ ID NO: 7559; WAN024FIR; Start 9; Stop 33
cctagtaaacagatacttgctaatc

SEQ ID NO: 471336 - DNA, 25 bp, Artificial
  probe
  misc_feature (1)..(25): SEQ ID NO: 7559; WAN024FIR; Start 118; Stop 142
attattttacaaagtcaagcaaagc

SEQ ID NO: 471337 - DNA, 25 bp, Artificial
  probe
  misc_feature (1)..(25): SEQ ID NO: 7559; WAN024FIR; Start 4; Stop 28
ccaagcctagtaaacagatacttgc

SEQ ID NO: 471338 - DNA, 25 bp, Artificial
  probe
  misc_feature (1)..(25): SEQ ID NO: 7559; WAN024FIR; Start 3; Stop 27
gccaagcctagtaaacagatacttg

SEQ ID NO: 471339 - DNA, 25 bp, Artificial
  probe
  misc_feature (1)..(25): SEQ ID NO: 7559; WAN024FIR; Start 114; Stop 138
actgattattttacaaagtcaagca

SEQ ID NO: 471340 - DNA, 25 bp, Artificial
  probe
  misc_feature (1)..(25): SEQ ID NO: 7559; WAN024FIR; Start 16; Stop 40
aacagatacttgctaatccaatttt

SEQ ID NO: 471341 - DNA, 25 bp, Artificial
  probe
  misc_feature (1)..(25): SEQ ID NO: 7559; WAN024FIR; Start 80; Stop 104
atctgaatgctgttccacctagctt

SEQ ID NO: 471342 - DNA, 25 bp, Artificial
  probe
  misc_feature (1)..(25): SEQ ID NO: 7559; WAN024FIR; Start 75; Stop 99
cagacatctgaatgctgttccacct

SEQ ID NO: 471343 - DNA, 25 bp, Artificial
  probe
  misc_feature (1)..(25): SEQ ID NO: 7559; WAN024FIR; Start 38; Stop 62
ttttgttttcaatctttctctccta

SEQ ID NO: 471344 - DNA, 25 bp, Artificial
  probe
  misc_feature (1)..(25): SEQ ID NO: 7559; WAN024FIR; Start 200; Stop 224
gcaagccatgtatgaagcaacattt

SEQ ID NO: 471345 - DNA, 25 bp, Artificial
  probe
  misc_feature (1)..(25): SEQ ID NO: 7560; WAN024DEF; Start 32; Stop 56
cttcgtctaacttattaacagcacc

SEQ ID NO: 471346 - DNA, 25 bp, Artificial
  probe
  misc_feature (1)..(25): SEQ ID NO: 7560; WAN024DEF; Start 33; Stop 57
ttcgtctaacttattaacagcaccg

SEQ ID NO: 471347 - DNA, 25 bp, Artificial
  probe
  misc_feature (1)..(25): SEQ ID NO: 7560; WAN024DEF; Start 79; Stop 103
actgaacccactactttgatattct

SEQ ID NO: 471348 - DNA, 25 bp, Artificial
  probe
  misc_feature (1)..(25): SEQ ID NO: 7560; WAN024DEF; Start 68; Stop 92
tatttcctgttactgaacccactac

SEQ ID NO: 471349 - DNA, 25 bp, Artificial
  probe
  misc_feature (1)..(25): SEQ ID NO: 7560; WAN024DEF; Start 62; Stop 86
catcgttatttcctgttactgaacc

SEQ ID NO: 471350 - DNA, 25 bp, Artificial
  probe
  misc_feature (1)..(25): SEQ ID NO: 7560; WAN024DEF; Start 74; Stop 98
ctgttactgaacccactactttgat

SEQ ID NO: 471351 - DNA, 25 bp, Artificial
  probe
  misc_feature (1)..(25): SEQ ID NO: 7560; WAN024DEF; Start 75; Stop 99
tgttactgaacccactactttgata

SEQ ID NO: 471352 - DNA, 25 bp, Artificial
  probe
  misc_feature (1)..(25): SEQ ID NO: 7560; WAN024DEF; Start 67; Stop 91
ttatttcctgttactgaacccacta

SEQ ID NO: 471353 - DNA, 25 bp, Artificial
  probe
  misc_feature (1)..(25): SEQ ID NO: 7560; WAN024DEF; Start 66; Stop 90
gttatttcctgttactgaacccact

SEQ ID NO: 471354 - DNA, 25 bp, Artificial
  probe
  misc_feature (1)..(25): SEQ ID NO: 7560; WAN024DEF; Start 63; Stop 87
atcgttatttcctgttactgaaccc

SEQ ID NO: 471355 - DNA, 25 bp, Artificial
  probe
  misc_feature (1)..(25): SEQ ID NO: 7560; WAN024DEF; Start 80; Stop 104
ctgaacccactactttgatattctc

SEQ ID NO: 471356 - DNA, 25 bp, Artificial
  probe
  misc_feature (1)..(25): SEQ ID NO: 7560; WAN024DEF; Start 31; Stop 55
gcttcgtctaacttattaacagcac

SEQ ID NO: 471357 - DNA, 25 bp, Artificial
  probe
  misc_feature (1)..(25): SEQ ID NO: 7560; WAN024DEF; Start 22; Stop 46
cgcatattagcttcgtctaacttat

SEQ ID NO: 471358 - DNA, 25 bp, Artificial
  probe
  misc_feature (1)..(25): SEQ ID NO: 7560; WAN024DEF; Start 81; Stop 105
tgaacccactactttgatattctca

SEQ ID NO: 471359 - DNA, 25 bp, Artificial
  probe
  misc_feature (1)..(25): SEQ ID NO: 7560; WAN024DEF; Start 69; Stop 93
atttcctgttactgaacccactact

SEQ ID NO: 471360 - DNA, 25 bp, Artificial
  probe
  misc_feature (1)..(25): SEQ ID NO: 7560; WAN024DEF; Start 56; Stop 80
cggttacatcgttatttcctgttac

SEQ ID NO: 471361 - DNA, 25 bp, Artificial
  probe
  misc_feature (1)..(25): SEQ ID NO: 7560; WAN024DEF; Start 71; Stop 95
ttcctgttactgaacccactacttt

SEQ ID NO: 471362 - DNA, 25 bp, Artificial
  probe
  misc_feature (1)..(25): SEQ ID NO: 7560; WAN024DEF; Start 70; Stop 94
tttcctgttactgaacccactactt

SEQ ID NO: 471363 - DNA, 25 bp, Artificial
  probe
  misc_feature (1)..(25): SEQ ID NO: 7560; WAN024DEF; Start 61; Stop 85
acatcgttatttcctgttactgaac

SEQ ID NO: 471364 - DNA, 25 bp, Artificial
  probe
  misc_feature (1)..(25): SEQ ID NO: 7560; WAN024DEF; Start 76; Stop 100
gttactgaacccactactttgatat

SEQ ID NO: 471365 - DNA, 25 bp, Artificial
  probe
  misc_feature (1)..(25): SEQ ID NO: 7560; WAN024DEF; Start 78; Stop 102
tactgaacccactactttgatattc

SEQ ID NO: 471366 - DNA, 25 bp, Artificial
  probe
  misc_feature (1)..(25): SEQ ID NO: 7560; WAN024DEF; Start 65; Stop 89
cgttatttcctgttactgaacccac

SEQ ID NO: 471367 - DNA, 25 bp, Artificial
  probe
  misc_feature (1)..(25): SEQ ID NO: 7560; WAN024DEF; Start 57; Stop 81
ggttacatcgttatttcctgttact

SEQ ID NO: 471368 - DNA, 25 bp, Artificial
  probe
  misc_feature (1)..(25): SEQ ID NO: 7560; WAN024DEF; Start 64; Stop 88
tcgttatttcctgttactgaaccca

SEQ ID NO: 471369 - DNA, 25 bp, Artificial
  probe
  misc_feature (1)..(25): SEQ ID NO: 7560; WAN024DEF; Start 207; Stop 231
ttcagcctcattaaacaaaggtctt

SEQ ID NO: 471370 - DNA, 25 bp, Artificial
  probe
  misc_feature (1)..(25): SEQ ID NO: 7560; WAN024DEF; Start 73; Stop 97
cctgttactgaacccactactttga

SEQ ID NO: 471371 - DNA, 25 bp, Artificial
  probe
  misc_feature (1)..(25): SEQ ID NO: 7560; WAN024DEF; Start 72; Stop 96
tcctgttactgaacccactactttg

SEQ ID NO: 471372 - DNA, 25 bp, Artificial
  probe
  misc_feature (1)..(25): SEQ ID NO: 7560; WAN024DEF; Start 77; Stop 101
ttactgaacccactactttgatatt

SEQ ID NO: 471373 - DNA, 25 bp, Artificial
  probe
  misc_feature (1)..(25): SEQ ID NO: 7560; WAN024DEF; Start 210; Stop 234
agcctcattaaacaaaggtctttct

SEQ ID NO: 471374 - DNA, 25 bp, Artificial
  probe
  misc_feature (1)..(25): SEQ ID NO: 7560; WAN024DEF; Start 209; Stop 233
cagcctcattaaacaaaggtctttc

SEQ ID NO: 471375 - DNA, 25 bp, Artificial
  probe
  misc_feature (1)..(25): SEQ ID NO: 7560; WAN024DEF; Start 200; Stop 224
tagcaccttcagcctcattaaacaa

SEQ ID NO: 471376 - DNA, 25 bp, Artificial
  probe
  misc_feature (1)..(25): SEQ ID NO: 7560; WAN024DEF; Start 30; Stop 54
agcttcgtctaacttattaacagca

SEQ ID NO: 471377 - DNA, 25 bp, Artificial
  probe
  misc_feature (1)..(25): SEQ ID NO: 7560; WAN024DEF; Start 211; Stop 235
gcctcattaaacaaaggtctttcta

SEQ ID NO: 471378 - DNA, 25 bp, Artificial
  probe
  misc_feature (1)..(25): SEQ ID NO: 7561; WAN024COG; Start 15; Stop 39
tgaggttcagatattcttgataggc

SEQ ID NO: 471379 - DNA, 25 bp, Artificial
  probe
  misc_feature (1)..(25): SEQ ID NO: 7561; WAN024COG; Start 16; Stop 40
gaggttcagatattcttgataggct

SEQ ID NO: 471380 - DNA, 25 bp, Artificial
  probe
  misc_feature (1)..(25): SEQ ID NO: 7561; WAN024COG; Start 17; Stop 41
aggttcagatattcttgataggctg

SEQ ID NO: 471381 - DNA, 25 bp, Artificial
  probe
  misc_feature (1)..(25): SEQ ID NO: 7561; WAN024COG; Start 20; Stop 44
ttcagatattcttgataggctgctt

SEQ ID NO: 471382 - DNA, 25 bp, Artificial
  probe
  misc_feature (1)..(25): SEQ ID NO: 7561; WAN024COG; Start 21; Stop 45
tcagatattcttgataggctgcttg

SEQ ID NO: 471383 - DNA, 25 bp, Artificial
  probe
  misc_feature (1)..(25): SEQ ID NO: 7561; WAN024COG; Start 19; Stop 43
gttcagatattcttgataggctgct

SEQ ID NO: 471384 - DNA, 25 bp, Artificial
  probe
  misc_feature (1)..(25): SEQ ID NO: 7561; WAN024COG; Start 132; Stop 156
actgtatatcactgatgaagccttc

SEQ ID NO: 471385 - DNA, 25 bp, Artificial
  probe
  misc_feature (1)..(25): SEQ ID NO: 7561; WAN024COG; Start 131; Stop 155
tactgtatatcactgatgaagcctt

SEQ ID NO: 471386 - DNA, 25 bp, Artificial
  probe
  misc_feature (1)..(25): SEQ ID NO: 7561; WAN024COG; Start 130; Stop 154
atactgtatatcactgatgaagcct

SEQ ID NO: 471387 - DNA, 25 bp, Artificial
  probe
  misc_feature (1)..(25): SEQ ID NO: 7561; WAN024COG; Start 18; Stop 42
ggttcagatattcttgataggctgc

SEQ ID NO: 471388 - DNA, 25 bp, Artificial
  probe
  misc_feature (1)..(25): SEQ ID NO: 7561; WAN024COG; Start 152; Stop 176
ccttcaactccatgttcaaccttag

SEQ ID NO: 471389 - DNA, 25 bp, Artificial
  probe
  misc_feature (1)..(25): SEQ ID NO: 7561; WAN024COG; Start 14; Stop 38
ttgaggttcagatattcttgatagg

SEQ ID NO: 471390 - DNA, 25 bp, Artificial
  probe
  misc_feature (1)..(25): SEQ ID NO: 7561; WAN024COG; Start 12; Stop 36
ccttgaggttcagatattcttgata

SEQ ID NO: 471391 - DNA, 25 bp, Artificial
  probe
  misc_feature (1)..(25): SEQ ID NO: 7561; WAN024COG; Start 129; Stop 153
aatactgtatatcactgatgaagcc

SEQ ID NO: 471392 - DNA, 25 bp, Artificial
  probe
  misc_feature (1)..(25): SEQ ID NO: 7561; WAN024COG; Start 22; Stop 46
cagatattcttgataggctgcttgc

SEQ ID NO: 471393 - DNA, 25 bp, Artificial
  probe
  misc_feature (1)..(25): SEQ ID NO: 7561; WAN024COG; Start 241; Stop 265
atcccactcaatatctctaatgctt

SEQ ID NO: 471394 - DNA, 25 bp, Artificial
  probe
  misc_feature (1)..(25): SEQ ID NO: 7561; WAN024COG; Start 235; Stop 259
gtcatcatcccactcaatatctcta

SEQ ID NO: 471395 - DNA, 25 bp, Artificial
  probe
  misc_feature (1)..(25): SEQ ID NO: 7561; WAN024COG; Start 240; Stop 264
catcccactcaatatctctaatgct

SEQ ID NO: 471396 - DNA, 25 bp, Artificial
  probe
  misc_feature (1)..(25): SEQ ID NO: 7561; WAN024COG; Start 239; Stop 263
tcatcccactcaatatctctaatgc

SEQ ID NO: 471397 - DNA, 25 bp, Artificial
  probe
  misc_feature (1)..(25): SEQ ID NO: 7561; WAN024COG; Start 153; Stop 177
cttcaactccatgttcaaccttagc

SEQ ID NO: 471398 - DNA, 25 bp, Artificial
  probe
  misc_feature (1)..(25): SEQ ID NO: 7561; WAN024COG; Start 223; Stop 247
aataaattcacagtcatcatcccac

SEQ ID NO: 471399 - DNA, 25 bp, Artificial
  probe
  misc_feature (1)..(25): SEQ ID NO: 7561; WAN024COG; Start 242; Stop 266
tcccactcaatatctctaatgctta

SEQ ID NO: 471400 - DNA, 25 bp, Artificial
  probe
  misc_feature (1)..(25): SEQ ID NO: 7561; WAN024COG; Start 236; Stop 260
tcatcatcccactcaatatctctaa

SEQ ID NO: 471401 - DNA, 25 bp, Artificial
  probe
  misc_feature (1)..(25): SEQ ID NO: 7561; WAN024COG; Start 222; Stop 246
aaataaattcacagtcatcatccca

SEQ ID NO: 471402 - DNA, 25 bp, Artificial
  probe
  misc_feature (1)..(25): SEQ ID NO: 7561; WAN024COG; Start 234; Stop 258
agtcatcatcccactcaatatctct

SEQ ID NO: 471403 - DNA, 25 bp, Artificial
  probe
  misc_feature (1)..(25): SEQ ID NO: 7561; WAN024COG; Start 233; Stop 257
cagtcatcatcccactcaatatctc

SEQ ID NO: 471404 - DNA, 25 bp, Artificial
  probe
  misc_feature (1)..(25): SEQ ID NO: 7561; WAN024COG; Start 224; Stop 248
ataaattcacagtcatcatcccact

SEQ ID NO: 471405 - DNA, 25 bp, Artificial
  probe
  misc_feature (1)..(25): SEQ ID NO: 7561; WAN024COG; Start 11; Stop 35
cccttgaggttcagatattcttgat

SEQ ID NO: 471406 - DNA, 25 bp, Artificial
  probe
  misc_feature (1)..(25): SEQ ID NO: 7561; WAN024COG; Start 225; Stop 249
taaattcacagtcatcatcccactc

SEQ ID NO: 471407 - DNA, 25 bp, Artificial
  probe
  misc_feature (1)..(25): SEQ ID NO: 7561; WAN024COG; Start 232; Stop 256
acagtcatcatcccactcaatatct

SEQ ID NO: 471408 - DNA, 25 bp, Artificial
  probe
  misc_feature (1)..(25): SEQ ID NO: 7561; WAN024COG; Start 231; Stop 255
cacagtcatcatcccactcaatatc

SEQ ID NO: 471409 - DNA, 25 bp, Artificial
  probe
  misc_feature (1)..(25): SEQ ID NO: 7561; WAN024COG; Start 155; Stop 179
tcaactccatgttcaaccttagcaa

SEQ ID NO: 471410 - DNA, 25 bp, Artificial
  probe
  misc_feature (1)..(25): SEQ ID NO: 7561; WAN024COG; Start 154; Stop 178
ttcaactccatgttcaaccttagca

SEQ ID NO: 471411 - DNA, 25 bp, Artificial
  probe
  misc_feature (1)..(25): SEQ ID NO: 7562; WAN024BZC; Start 41; Stop 65
tatcacccaaatccatttctttcct

SEQ ID NO: 471412 - DNA, 25 bp, Artificial
  probe
  misc_feature (1)..(25): SEQ ID NO: 7562; WAN024BZC; Start 40; Stop 64
ttatcacccaaatccatttctttcc

SEQ ID NO: 471413 - DNA, 25 bp, Artificial
  probe
  misc_feature (1)..(25): SEQ ID NO: 7562; WAN024BZC; Start 35; Stop 59
gctcattatcacccaaatccatttc

SEQ ID NO: 471414 - DNA, 25 bp, Artificial
  probe
  misc_feature (1)..(25): SEQ ID NO: 7562; WAN024BZC; Start 36; Stop 60
ctcattatcacccaaatccatttct

SEQ ID NO: 471415 - DNA, 25 bp, Artificial
  probe
  misc_feature (1)..(25): SEQ ID NO: 7562; WAN024BZC; Start 48; Stop 72
caaatccatttctttcctccgtata

SEQ ID NO: 471416 - DNA, 25 bp, Artificial
  probe
  misc_feature (1)..(25): SEQ ID NO: 7562; WAN024BZC; Start 47; Stop 71
ccaaatccatttctttcctccgtat

SEQ ID NO: 471417 - DNA, 25 bp, Artificial
  probe
  misc_feature (1)..(25): SEQ ID NO: 7562; WAN024BZC; Start 42; Stop 66
atcacccaaatccatttctttcctc

SEQ ID NO: 471418 - DNA, 25 bp, Artificial
  probe
  misc_feature (1)..(25): SEQ ID NO: 7562; WAN024BZC; Start 37; Stop 61
tcattatcacccaaatccatttctt

SEQ ID NO: 471419 - DNA, 25 bp, Artificial
  probe
  misc_feature (1)..(25): SEQ ID NO: 7562; WAN024BZC; Start 61; Stop 85
ttcctccgtataaagtttccttact

SEQ ID NO: 471420 - DNA, 25 bp, Artificial
  probe
  misc_feature (1)..(25): SEQ ID NO: 7562; WAN024BZC; Start 60; Stop 84
tttcctccgtataaagtttccttac

SEQ ID NO: 471421 - DNA, 25 bp, Artificial
  probe
  misc_feature (1)..(25): SEQ ID NO: 7562; WAN024BZC; Start 23; Stop 47
gagtcagtgttagctcattatcacc

SEQ ID NO: 471422 - DNA, 25 bp, Artificial
  probe
  misc_feature (1)..(25): SEQ ID NO: 7562; WAN024BZC; Start 22; Stop 46
ggagtcagtgttagctcattatcac

SEQ ID NO: 471423 - DNA, 25 bp, Artificial
  probe
  misc_feature (1)..(25): SEQ ID NO: 7562; WAN024BZC; Start 50; Stop 74
aatccatttctttcctccgtataaa

SEQ ID NO: 471424 - DNA, 25 bp, Artificial
  probe
  misc_feature (1)..(25): SEQ ID NO: 7562; WAN024BZC; Start 49; Stop 73
aaatccatttctttcctccgtataa

SEQ ID NO: 471425 - DNA, 25 bp, Artificial
  probe
  misc_feature (1)..(25): SEQ ID NO: 7562; WAN024BZC; Start 62; Stop 86
tcctccgtataaagtttccttacta

SEQ ID NO: 471426 - DNA, 25 bp, Artificial
  probe
  misc_feature (1)..(25): SEQ ID NO: 7562; WAN024BZC; Start 38; Stop 62
cattatcacccaaatccatttcttt

SEQ ID NO: 471427 - DNA, 25 bp, Artificial
  probe
  misc_feature (1)..(25): SEQ ID NO: 7562; WAN024BZC; Start 39; Stop 63
attatcacccaaatccatttctttc

SEQ ID NO: 471428 - DNA, 25 bp, Artificial
  probe
  misc_feature (1)..(25): SEQ ID NO: 7562; WAN024BZC; Start 33; Stop 57
tagctcattatcacccaaatccatt

SEQ ID NO: 471429 - DNA, 25 bp, Artificial
  probe
  misc_feature (1)..(25): SEQ ID NO: 7562; WAN024BZC; Start 32; Stop 56
ttagctcattatcacccaaatccat

SEQ ID NO: 471430 - DNA, 25 bp, Artificial
  probe
  misc_feature (1)..(25): SEQ ID NO: 7562; WAN024BZC; Start 34; Stop 58
agctcattatcacccaaatccattt

SEQ ID NO: 471431 - DNA, 25 bp, Artificial
  probe
  misc_feature (1)..(25): SEQ ID NO: 7562; WAN024BZC; Start 31; Stop 55
gttagctcattatcacccaaatcca

SEQ ID NO: 471432 - DNA, 25 bp, Artificial
  probe
  misc_feature (1)..(25): SEQ ID NO: 7562; WAN024BZC; Start 30; Stop 54
tgttagctcattatcacccaaatcc

SEQ ID NO: 471433 - DNA, 25 bp, Artificial
  probe
  misc_feature (1)..(25): SEQ ID NO: 7562; WAN024BZC; Start 63; Stop 87
cctccgtataaagtttccttactat

SEQ ID NO: 471434 - DNA, 25 bp, Artificial
  probe
  misc_feature (1)..(25): SEQ ID NO: 7562; WAN024BZC; Start 46; Stop 70
cccaaatccatttctttcctccgta

SEQ ID NO: 471435 - DNA, 25 bp, Artificial
  probe
  misc_feature (1)..(25): SEQ ID NO: 7562; WAN024BZC; Start 18; Stop 42
tatgggagtcagtgttagctcatta

SEQ ID NO: 471436 - DNA, 25 bp, Artificial
  probe
  misc_feature (1)..(25): SEQ ID NO: 7562; WAN024BZC; Start 58; Stop 82
tctttcctccgtataaagtttcctt

SEQ ID NO: 471437 - DNA, 25 bp, Artificial
  probe
  misc_feature (1)..(25): SEQ ID NO: 7562; WAN024BZC; Start 57; Stop 81
ttctttcctccgtataaagtttcct

SEQ ID NO: 471438 - DNA, 25 bp, Artificial
  probe
  misc_feature (1)..(25): SEQ ID NO: 7562; WAN024BZC; Start 52; Stop 76
tccatttctttcctccgtataaagt

SEQ ID NO: 471439 - DNA, 25 bp, Artificial
  probe
  misc_feature (1)..(25): SEQ ID NO: 7562; WAN024BZC; Start 43; Stop 67
tcacccaaatccatttctttcctcc

SEQ ID NO: 471440 - DNA, 25 bp, Artificial
  probe
  misc_feature (1)..(25): SEQ ID NO: 7562; WAN024BZC; Start 53; Stop 77
ccatttctttcctccgtataaagtt

SEQ ID NO: 471441 - DNA, 25 bp, Artificial
  probe
  misc_feature (1)..(25): SEQ ID NO: 7562; WAN024BZC; Start 29; Stop 53
gtgttagctcattatcacccaaatc

SEQ ID NO: 471442 - DNA, 25 bp, Artificial
  probe
  misc_feature (1)..(25): SEQ ID NO: 7562; WAN024BZC; Start 19; Stop 43
atgggagtcagtgttagctcattat

SEQ ID NO: 471443 - DNA, 25 bp, Artificial
  probe
  misc_feature (1)..(25): SEQ ID NO: 7562; WAN024BZC; Start 56; Stop 80
tttctttcctccgtataaagtttcc

SEQ ID NO: 471444 - DNA, 25 bp, Artificial
  probe
  misc_feature (1)..(25): SEQ ID NO: 7563; WAN024BJO; Start 66; Stop 90
tgttgaaacggatatggaactaact

SEQ ID NO: 471445 - DNA, 25 bp, Artificial
  probe
  misc_feature (1)..(25): SEQ ID NO: 7563; WAN024BJO; Start 65; Stop 89
ttgttgaaacggatatggaactaac

SEQ ID NO: 471446 - DNA, 25 bp, Artificial
  probe
  misc_feature (1)..(25): SEQ ID NO: 7563; WAN024BJO; Start 64; Stop 88
tttgttgaaacggatatggaactaa

SEQ ID NO: 471447 - DNA, 25 bp, Artificial
  probe
  misc_feature (1)..(25): SEQ ID NO: 7563; WAN024BJO; Start 67; Stop 91
gttgaaacggatatggaactaacta

SEQ ID NO: 471448 - DNA, 25 bp, Artificial
  probe
  misc_feature (1)..(25): SEQ ID NO: 7563; WAN024BJO; Start 5; Stop 29
cagatcaattacagggatttggaac

SEQ ID NO: 471449 - DNA, 25 bp, Artificial
  probe
  misc_feature (1)..(25): SEQ ID NO: 7563; WAN024BJO; Start 68; Stop 92
ttgaaacggatatggaactaactaa

SEQ ID NO: 471450 - DNA, 25 bp, Artificial
  probe
  misc_feature (1)..(25): SEQ ID NO: 7563; WAN024BJO; Start 6; Stop 30
agatcaattacagggatttggaacc

SEQ ID NO: 471451 - DNA, 25 bp, Artificial
  probe
  misc_feature (1)..(25): SEQ ID NO: 7563; WAN024BJO; Start 69; Stop 93
tgaaacggatatggaactaactaat

SEQ ID NO: 471452 - DNA, 25 bp, Artificial
  probe
  misc_feature (1)..(25): SEQ ID NO: 7563; WAN024BJO; Start 1; Stop 25
ttgccagatcaattacagggatttg

SEQ ID NO: 471453 - DNA, 25 bp, Artificial
  probe
  misc_feature (1)..(25): SEQ ID NO: 7563; WAN024BJO; Start 7; Stop 31
gatcaattacagggatttggaaccg

SEQ ID NO: 471454 - DNA, 25 bp, Artificial
  probe
  misc_feature (1)..(25): SEQ ID NO: 7563; WAN024BJO; Start 4; Stop 28
ccagatcaattacagggatttggaa

SEQ ID NO: 471455 - DNA, 25 bp, Artificial
  probe
  misc_feature (1)..(25): SEQ ID NO: 7563; WAN024BJO; Start 62; Stop 86
attttgttgaaacggatatggaact

SEQ ID NO: 471456 - DNA, 25 bp, Artificial
  probe
  misc_feature (1)..(25): SEQ ID NO: 7563; WAN024BJO; Start 61; Stop 85
cattttgttgaaacggatatggaac

SEQ ID NO: 471457 - DNA, 25 bp, Artificial
  probe
  misc_feature (1)..(25): SEQ ID NO: 7563; WAN024BJO; Start 63; Stop 87
ttttgttgaaacggatatggaacta

SEQ ID NO: 471458 - DNA, 25 bp, Artificial
  probe
  misc_feature (1)..(25): SEQ ID NO: 7563; WAN024BJO; Start 60; Stop 84
tcattttgttgaaacggatatggaa

SEQ ID NO: 471459 - DNA, 25 bp, Artificial
  probe
  misc_feature (1)..(25): SEQ ID NO: 7563; WAN024BJO; Start 59; Stop 83
atcattttgttgaaacggatatgga

SEQ ID NO: 471460 - DNA, 25 bp, Artificial
  probe
  misc_feature (1)..(25): SEQ ID NO: 7563; WAN024BJO; Start 3; Stop 27
gccagatcaattacagggatttgga

SEQ ID NO: 471461 - DNA, 25 bp, Artificial
  probe
  misc_feature (1)..(25): SEQ ID NO: 7563; WAN024BJO; Start 2; Stop 26
tgccagatcaattacagggatttgg

SEQ ID NO: 471462 - DNA, 25 bp, Artificial
  probe
  misc_feature (1)..(25): SEQ ID NO: 7563; WAN024BJO; Start 58; Stop 82
tatcattttgttgaaacggatatgg

SEQ ID NO: 471463 - DNA, 25 bp, Artificial
  probe
  misc_feature (1)..(25): SEQ ID NO: 7563; WAN024BJO; Start 8; Stop 32
atcaattacagggatttggaaccgg

SEQ ID NO: 471464 - DNA, 25 bp, Artificial
  probe
  misc_feature (1)..(25): SEQ ID NO: 7563; WAN024BJO; Start 57; Stop 81
ttatcattttgttgaaacggatatg

SEQ ID NO: 471465 - DNA, 25 bp, Artificial
  probe
  misc_feature (1)..(25): SEQ ID NO: 7564; WAN024GJP; Start 198; Stop 222
gcagataagaacgcagatagagatt

SEQ ID NO: 471466 - DNA, 25 bp, Artificial
  probe
  misc_feature (1)..(25): SEQ ID NO: 7564; WAN024GJP; Start 197; Stop 221
cgcagataagaacgcagatagagat

SEQ ID NO: 471467 - DNA, 25 bp, Artificial
  probe
  misc_feature (1)..(25): SEQ ID NO: 7564; WAN024GJP; Start 195; Stop 219
ttcgcagataagaacgcagatagag

SEQ ID NO: 471468 - DNA, 25 bp, Artificial
  probe
  misc_feature (1)..(25): SEQ ID NO: 7564; WAN024GJP; Start 73; Stop 97
gaagagcaagaggtagttaaagaga

SEQ ID NO: 471469 - DNA, 25 bp, Artificial
  probe
  misc_feature (1)..(25): SEQ ID NO: 7564; WAN024GJP; Start 72; Stop 96
ggaagagcaagaggtagttaaagag

SEQ ID NO: 471470 - DNA, 25 bp, Artificial
  probe
  misc_feature (1)..(25): SEQ ID NO: 7564; WAN024GJP; Start 74; Stop 98
aagagcaagaggtagttaaagagaa

SEQ ID NO: 471471 - DNA, 25 bp, Artificial
  probe
  misc_feature (1)..(25): SEQ ID NO: 7564; WAN024GJP; Start 70; Stop 94
ctggaagagcaagaggtagttaaag

SEQ ID NO: 471472 - DNA, 25 bp, Artificial
  probe
  misc_feature (1)..(25): SEQ ID NO: 7564; WAN024GJP; Start 75; Stop 99
agagcaagaggtagttaaagagaac

SEQ ID NO: 471473 - DNA, 25 bp, Artificial
  probe
  misc_feature (1)..(25): SEQ ID NO: 7564; WAN024GJP; Start 71; Stop 95
tggaagagcaagaggtagttaaaga

SEQ ID NO: 471474 - DNA, 25 bp, Artificial
  probe
  misc_feature (1)..(25): SEQ ID NO: 7564; WAN024GJP; Start 199; Stop 223
cagataagaacgcagatagagattt

SEQ ID NO: 471475 - DNA, 25 bp, Artificial
  probe
  misc_feature (1)..(25): SEQ ID NO: 7564; WAN024GJP; Start 19; Stop 43
aaagagttgggtcaaatactggtag

SEQ ID NO: 471476 - DNA, 25 bp, Artificial
  probe
  misc_feature (1)..(25): SEQ ID NO: 7564; WAN024GJP; Start 18; Stop 42
gaaagagttgggtcaaatactggta

SEQ ID NO: 471477 - DNA, 25 bp, Artificial
  probe
  misc_feature (1)..(25): SEQ ID NO: 7564; WAN024GJP; Start 196; Stop 220
tcgcagataagaacgcagatagaga

SEQ ID NO: 471478 - DNA, 25 bp, Artificial
  probe
  misc_feature (1)..(25): SEQ ID NO: 7564; WAN024GJP; Start 193; Stop 217
atttcgcagataagaacgcagatag

SEQ ID NO: 471479 - DNA, 25 bp, Artificial
  probe
  misc_feature (1)..(25): SEQ ID NO: 7564; WAN024GJP; Start 25; Stop 49
ttgggtcaaatactggtagtcaaag

SEQ ID NO: 471480 - DNA, 25 bp, Artificial
  probe
  misc_feature (1)..(25): SEQ ID NO: 7564; WAN024GJP; Start 88; Stop 112
gttaaagagaactaccactgctgtc

SEQ ID NO: 471481 - DNA, 25 bp, Artificial
  probe
  misc_feature (1)..(25): SEQ ID NO: 7564; WAN024GJP; Start 24; Stop 48
gttgggtcaaatactggtagtcaaa

SEQ ID NO: 471482 - DNA, 25 bp, Artificial
  probe
  misc_feature (1)..(25): SEQ ID NO: 7564; WAN024GJP; Start 29; Stop 53
gtcaaatactggtagtcaaaggcat

SEQ ID NO: 471483 - DNA, 25 bp, Artificial
  probe
  misc_feature (1)..(25): SEQ ID NO: 7564; WAN024GJP; Start 192; Stop 216
catttcgcagataagaacgcagata

SEQ ID NO: 471484 - DNA, 25 bp, Artificial
  probe
  misc_feature (1)..(25): SEQ ID NO: 7564; WAN024GJP; Start 158; Stop 182
aagagaagacgaagactgagagcaa

SEQ ID NO: 471485 - DNA, 25 bp, Artificial
  probe
  misc_feature (1)..(25): SEQ ID NO: 7564; WAN024GJP; Start 154; Stop 178
aagcaagagaagacgaagactgaga

SEQ ID NO: 471486 - DNA, 25 bp, Artificial
  probe
  misc_feature (1)..(25): SEQ ID NO: 7564; WAN024GJP; Start 69; Stop 93
actggaagagcaagaggtagttaaa

SEQ ID NO: 471487 - DNA, 25 bp, Artificial
  probe
  misc_feature (1)..(25): SEQ ID NO: 7564; WAN024GJP; Start 20; Stop 44
aagagttgggtcaaatactggtagt

SEQ ID NO: 471488 - DNA, 25 bp, Artificial
  probe
  misc_feature (1)..(25): SEQ ID NO: 7564; WAN024GJP; Start 23; Stop 47
agttgggtcaaatactggtagtcaa

SEQ ID NO: 471489 - DNA, 25 bp, Artificial
  probe
  misc_feature (1)..(25): SEQ ID NO: 7564; WAN024GJP; Start 21; Stop 45
agagttgggtcaaatactggtagtc

SEQ ID NO: 471490 - DNA, 25 bp, Artificial
  probe
  misc_feature (1)..(25): SEQ ID NO: 7564; WAN024GJP; Start 34; Stop 58
atactggtagtcaaaggcatgatag

SEQ ID NO: 471491 - DNA, 25 bp, Artificial
  probe
  misc_feature (1)..(25): SEQ ID NO: 7564; WAN024GJP; Start 32; Stop 56
aaatactggtagtcaaaggcatgat

SEQ ID NO: 471492 - DNA, 25 bp, Artificial
  probe
  misc_feature (1)..(25): SEQ ID NO: 7564; WAN024GJP; Start 33; Stop 57
aatactggtagtcaaaggcatgata

SEQ ID NO: 471493 - DNA, 25 bp, Artificial
  probe
  misc_feature (1)..(25): SEQ ID NO: 7564; WAN024GJP; Start 35; Stop 59
tactggtagtcaaaggcatgataga

SEQ ID NO: 471494 - DNA, 25 bp, Artificial
  probe
  misc_feature (1)..(25): SEQ ID NO: 7564; WAN024GJP; Start 194; Stop 218
tttcgcagataagaacgcagataga

SEQ ID NO: 471495 - DNA, 25 bp, Artificial
  probe
  misc_feature (1)..(25): SEQ ID NO: 7564; WAN024GJP; Start 155; Stop 179
agcaagagaagacgaagactgagag

SEQ ID NO: 471496 - DNA, 25 bp, Artificial
  probe
  misc_feature (1)..(25): SEQ ID NO: 7564; WAN024GJP; Start 22; Stop 46
gagttgggtcaaatactggtagtca

SEQ ID NO: 471497 - DNA, 25 bp, Artificial
  probe
  misc_feature (1)..(25): SEQ ID NO: 7564; WAN024GJP; Start 31; Stop 55
caaatactggtagtcaaaggcatga

SEQ ID NO: 471498 - DNA, 25 bp, Artificial
  probe
  misc_feature (1)..(25): SEQ ID NO: 7565; WAN024BJZ; Start 72; Stop 96
acatctaagcaacatatctcctaca

SEQ ID NO: 471499 - DNA, 25 bp, Artificial
  probe
  misc_feature (1)..(25): SEQ ID NO: 7565; WAN024BJZ; Start 76; Stop 100
ctaagcaacatatctcctacaatcc

SEQ ID NO: 471500 - DNA, 25 bp, Artificial
  probe
  misc_feature (1)..(25): SEQ ID NO: 7565; WAN024BJZ; Start 69; Stop 93
agaacatctaagcaacatatctcct

SEQ ID NO: 471501 - DNA, 25 bp, Artificial
  probe
  misc_feature (1)..(25): SEQ ID NO: 7565; WAN024BJZ; Start 68; Stop 92
aagaacatctaagcaacatatctcc

SEQ ID NO: 471502 - DNA, 25 bp, Artificial
  probe
  misc_feature (1)..(25): SEQ ID NO: 7565; WAN024BJZ; Start 73; Stop 97
catctaagcaacatatctcctacaa

SEQ ID NO: 471503 - DNA, 25 bp, Artificial
  probe
  misc_feature (1)..(25): SEQ ID NO: 7565; WAN024BJZ; Start 71; Stop 95
aacatctaagcaacatatctcctac

SEQ ID NO: 471504 - DNA, 25 bp, Artificial
  probe
  misc_feature (1)..(25): SEQ ID NO: 7565; WAN024BJZ; Start 75; Stop 99
tctaagcaacatatctcctacaatc

SEQ ID NO: 471505 - DNA, 25 bp, Artificial
  probe
  misc_feature (1)..(25): SEQ ID NO: 7565; WAN024BJZ; Start 70; Stop 94
gaacatctaagcaacatatctccta

SEQ ID NO: 471506 - DNA, 25 bp, Artificial
  probe
  misc_feature (1)..(25): SEQ ID NO: 7565; WAN024BJZ; Start 66; Stop 90
tcaagaacatctaagcaacatatct

SEQ ID NO: 471507 - DNA, 25 bp, Artificial
  probe
  misc_feature (1)..(25): SEQ ID NO: 7565; WAN024BJZ; Start 67; Stop 91
caagaacatctaagcaacatatctc

SEQ ID NO: 471508 - DNA, 25 bp, Artificial
  probe
  misc_feature (1)..(25): SEQ ID NO: 7565; WAN024BJZ; Start 74; Stop 98
atctaagcaacatatctcctacaat

SEQ ID NO: 471509 - DNA, 25 bp, Artificial
  probe
  misc_feature (1)..(25): SEQ ID NO: 7565; WAN024BJZ; Start 77; Stop 101
taagcaacatatctcctacaatccc

SEQ ID NO: 471510 - DNA, 25 bp, Artificial
  probe
  misc_feature (1)..(25): SEQ ID NO: 7565; WAN024BJZ; Start 65; Stop 89
atcaagaacatctaagcaacatatc

SEQ ID NO: 471511 - DNA, 25 bp, Artificial
  probe
  misc_feature (1)..(25): SEQ ID NO: 7565; WAN024BJZ; Start 78; Stop 102
aagcaacatatctcctacaatccct

SEQ ID NO: 471512 - DNA, 25 bp, Artificial
  probe
  misc_feature (1)..(25): SEQ ID NO: 7565; WAN024BJZ; Start 79; Stop 103
agcaacatatctcctacaatccctg

SEQ ID NO: 471513 - DNA, 25 bp, Artificial
  probe
  misc_feature (1)..(25): SEQ ID NO: 7565; WAN024BJZ; Start 64; Stop 88
aatcaagaacatctaagcaacatat

SEQ ID NO: 471514 - DNA, 25 bp, Artificial
  probe
  misc_feature (1)..(25): SEQ ID NO: 7565; WAN024BJZ; Start 80; Stop 104
gcaacatatctcctacaatccctgt

SEQ ID NO: 471515 - DNA, 25 bp, Artificial
  probe
  misc_feature (1)..(25): SEQ ID NO: 7565; WAN024BJZ; Start 81; Stop 105
caacatatctcctacaatccctgta

SEQ ID NO: 471516 - DNA, 25 bp, Artificial
  probe
  misc_feature (1)..(25): SEQ ID NO: 7565; WAN024BJZ; Start 63; Stop 87
aaatcaagaacatctaagcaacata

SEQ ID NO: 471517 - DNA, 25 bp, Artificial
  probe
  misc_feature (1)..(25): SEQ ID NO: 7565; WAN024BJZ; Start 50; Stop 74
acaaaacaccagaaaatcaagaaca

SEQ ID NO: 471518 - DNA, 25 bp, Artificial
  probe
  misc_feature (1)..(25): SEQ ID NO: 7565; WAN024BJZ; Start 51; Stop 75
caaaacaccagaaaatcaagaacat

SEQ ID NO: 471519 - DNA, 25 bp, Artificial
  probe
  misc_feature (1)..(25): SEQ ID NO: 7565; WAN024BJZ; Start 58; Stop 82
ccagaaaatcaagaacatctaagca

SEQ ID NO: 471520 - DNA, 25 bp, Artificial
  probe
  misc_feature (1)..(25): SEQ ID NO: 7565; WAN024BJZ; Start 57; Stop 81
accagaaaatcaagaacatctaagc

SEQ ID NO: 471521 - DNA, 25 bp, Artificial
  probe
  misc_feature (1)..(25): SEQ ID NO: 7565; WAN024BJZ; Start 46; Stop 70
cgttacaaaacaccagaaaatcaag

SEQ ID NO: 471522 - DNA, 25 bp, Artificial
  probe
  misc_feature (1)..(25): SEQ ID NO: 7565; WAN024BJZ; Start 52; Stop 76
aaaacaccagaaaatcaagaacatc

SEQ ID NO: 471523 - DNA, 25 bp, Artificial
  probe
  misc_feature (1)..(25): SEQ ID NO: 7565; WAN024BJZ; Start 53; Stop 77
aaacaccagaaaatcaagaacatct

SEQ ID NO: 471524 - DNA, 25 bp, Artificial
  probe
  misc_feature (1)..(25): SEQ ID NO: 7565; WAN024BJZ; Start 49; Stop 73
tacaaaacaccagaaaatcaagaac

SEQ ID NO: 471525 - DNA, 25 bp, Artificial
  probe
  misc_feature (1)..(25): SEQ ID NO: 7565; WAN024BJZ; Start 55; Stop 79
acaccagaaaatcaagaacatctaa

SEQ ID NO: 471526 - DNA, 25 bp, Artificial
  probe
  misc_feature (1)..(25): SEQ ID NO: 7565; WAN024BJZ; Start 54; Stop 78
aacaccagaaaatcaagaacatcta

SEQ ID NO: 471527 - DNA, 25 bp, Artificial
  probe
  misc_feature (1)..(25): SEQ ID NO: 7565; WAN024BJZ; Start 47; Stop 71
gttacaaaacaccagaaaatcaaga

SEQ ID NO: 471528 - DNA, 25 bp, Artificial
  probe
  misc_feature (1)..(25): SEQ ID NO: 7565; WAN024BJZ; Start 61; Stop 85
gaaaatcaagaacatctaagcaaca

SEQ ID NO: 471529 - DNA, 25 bp, Artificial
  probe
  misc_feature (1)..(25): SEQ ID NO: 7565; WAN024BJZ; Start 56; Stop 80
caccagaaaatcaagaacatctaag

SEQ ID NO: 471530 - DNA, 25 bp, Artificial
  probe
  misc_feature (1)..(25): SEQ ID NO: 7565; WAN024BJZ; Start 60; Stop 84
agaaaatcaagaacatctaagcaac

SEQ ID NO: 471531 - DNA, 25 bp, Artificial
  probe
  misc_feature (1)..(25): SEQ ID NO: 7566; WAN024BAN; Start 4; Stop 28
ccgtatgtatggttactgacttcgt

SEQ ID NO: 471532 - DNA, 25 bp, Artificial
  probe
  misc_feature (1)..(25): SEQ ID NO: 7566; WAN024BAN; Start 5; Stop 29
cgtatgtatggttactgacttcgtc

SEQ ID NO: 471533 - DNA, 25 bp, Artificial
  probe
  misc_feature (1)..(25): SEQ ID NO: 7566; WAN024BAN; Start 2; Stop 26
tgccgtatgtatggttactgacttc

SEQ ID NO: 471534 - DNA, 25 bp, Artificial
  probe
  misc_feature (1)..(25): SEQ ID NO: 7566; WAN024BAN; Start 3; Stop 27
gccgtatgtatggttactgacttcg

SEQ ID NO: 471535 - DNA, 25 bp, Artificial
  probe
  misc_feature (1)..(25): SEQ ID NO: 7567; WAN024FIJ; Start 109; Stop 133
tttcttatttatcgcctttgttacg

SEQ ID NO: 471536 - DNA, 25 bp, Artificial
  probe
  misc_feature (1)..(25): SEQ ID NO: 7567; WAN024FIJ; Start 56; Stop 80
tcttttcacattcggtctccttata

SEQ ID NO: 471537 - DNA, 25 bp, Artificial
  probe
  misc_feature (1)..(25): SEQ ID NO: 7567; WAN024FIJ; Start 111; Stop 135
tcttatttatcgcctttgttacgaa

SEQ ID NO: 471538 - DNA, 25 bp, Artificial
  probe
  misc_feature (1)..(25): SEQ ID NO: 7567; WAN024FIJ; Start 110; Stop 134
ttcttatttatcgcctttgttacga

SEQ ID NO: 471539 - DNA, 25 bp, Artificial
  probe
  misc_feature (1)..(25): SEQ ID NO: 7567; WAN024FIJ; Start 55; Stop 79
gtcttttcacattcggtctccttat

SEQ ID NO: 471540 - DNA, 25 bp, Artificial
  probe
  misc_feature (1)..(25): SEQ ID NO: 7567; WAN024FIJ; Start 57; Stop 81
cttttcacattcggtctccttatat

SEQ ID NO: 471541 - DNA, 25 bp, Artificial
  probe
  misc_feature (1)..(25): SEQ ID NO: 7567; WAN024FIJ; Start 112; Stop 136
cttatttatcgcctttgttacgaat

SEQ ID NO: 471542 - DNA, 25 bp, Artificial
  probe
  misc_feature (1)..(25): SEQ ID NO: 7567; WAN024FIJ; Start 50; Stop 74
tatttgtcttttcacattcggtctc

SEQ ID NO: 471543 - DNA, 25 bp, Artificial
  probe
  misc_feature (1)..(25): SEQ ID NO: 7567; WAN024FIJ; Start 49; Stop 73
ttatttgtcttttcacattcggtct

SEQ ID NO: 471544 - DNA, 25 bp, Artificial
  probe
  misc_feature (1)..(25): SEQ ID NO: 7567; WAN024FIJ; Start 48; Stop 72
tttatttgtcttttcacattcggtc

SEQ ID NO: 471545 - DNA, 25 bp, Artificial
  probe
  misc_feature (1)..(25): SEQ ID NO: 7567; WAN024FIJ; Start 60; Stop 84
ttcacattcggtctccttatataaa

SEQ ID NO: 471546 - DNA, 25 bp, Artificial
  probe
  misc_feature (1)..(25): SEQ ID NO: 7567; WAN024FIJ; Start 59; Stop 83
tttcacattcggtctccttatataa

SEQ ID NO: 471547 - DNA, 25 bp, Artificial
  probe
  misc_feature (1)..(25): SEQ ID NO: 7567; WAN024FIJ; Start 51; Stop 75
atttgtcttttcacattcggtctcc

SEQ ID NO: 471548 - DNA, 25 bp, Artificial
  probe
  misc_feature (1)..(25): SEQ ID NO: 7567; WAN024FIJ; Start 47; Stop 71
ttttatttgtcttttcacattcggt

SEQ ID NO: 471549 - DNA, 25 bp, Artificial
  probe
  misc_feature (1)..(25): SEQ ID NO: 7567; WAN024FIJ; Start 54; Stop 78
tgtcttttcacattcggtctcctta

SEQ ID NO: 471550 - DNA, 25 bp, Artificial
  probe
  misc_feature (1)..(25): SEQ ID NO: 7567; WAN024FIJ; Start 58; Stop 82
ttttcacattcggtctccttatata

SEQ ID NO: 471551 - DNA, 25 bp, Artificial
  probe
  misc_feature (1)..(25): SEQ ID NO: 7567; WAN024FIJ; Start 114; Stop 138
tatttatcgcctttgttacgaataa

SEQ ID NO: 471552 - DNA, 25 bp, Artificial
  probe
  misc_feature (1)..(25): SEQ ID NO: 7567; WAN024FIJ; Start 113; Stop 137
ttatttatcgcctttgttacgaata

SEQ ID NO: 471553 - DNA, 25 bp, Artificial
  probe
  misc_feature (1)..(25): SEQ ID NO: 7567; WAN024FIJ; Start 53; Stop 77
ttgtcttttcacattcggtctcctt

SEQ ID NO: 471554 - DNA, 25 bp, Artificial
  probe
  misc_feature (1)..(25): SEQ ID NO: 7567; WAN024FIJ; Start 52; Stop 76
tttgtcttttcacattcggtctcct

SEQ ID NO: 471555 - DNA, 25 bp, Artificial
  probe
  misc_feature (1)..(25): SEQ ID NO: 7567; WAN024FIJ; Start 46; Stop 70
attttatttgtcttttcacattcgg

SEQ ID NO: 471556 - DNA, 25 bp, Artificial
  probe
  misc_feature (1)..(25): SEQ ID NO: 7567; WAN024FIJ; Start 108; Stop 132
ttttcttatttatcgcctttgttac

SEQ ID NO: 471557 - DNA, 25 bp, Artificial
  probe
  misc_feature (1)..(25): SEQ ID NO: 7567; WAN024FIJ; Start 61; Stop 85
tcacattcggtctccttatataaaa

SEQ ID NO: 471558 - DNA, 25 bp, Artificial
  probe
  misc_feature (1)..(25): SEQ ID NO: 7567; WAN024FIJ; Start 45; Stop 69
aattttatttgtcttttcacattcg

SEQ ID NO: 471559 - DNA, 25 bp, Artificial
  probe
  misc_feature (1)..(25): SEQ ID NO: 7568; WAN024BOW; Start 146; Stop 170
aatcaggctatgtattggctattgt

SEQ ID NO: 471560 - DNA, 25 bp, Artificial
  probe
  misc_feature (1)..(25): SEQ ID NO: 7568; WAN024BOW; Start 142; Stop 166
gaagaatcaggctatgtattggcta

SEQ ID NO: 471561 - DNA, 25 bp, Artificial
  probe
  misc_feature (1)..(25): SEQ ID NO: 7568; WAN024BOW; Start 148; Stop 172
tcaggctatgtattggctattgtaa

SEQ ID NO: 471562 - DNA, 25 bp, Artificial
  probe
  misc_feature (1)..(25): SEQ ID NO: 7568; WAN024BOW; Start 145; Stop 169
gaatcaggctatgtattggctattg

SEQ ID NO: 471563 - DNA, 25 bp, Artificial
  probe
  misc_feature (1)..(25): SEQ ID NO: 7568; WAN024BOW; Start 144; Stop 168
agaatcaggctatgtattggctatt

SEQ ID NO: 471564 - DNA, 25 bp, Artificial
  probe
  misc_feature (1)..(25): SEQ ID NO: 7568; WAN024BOW; Start 143; Stop 167
aagaatcaggctatgtattggctat

SEQ ID NO: 471565 - DNA, 25 bp, Artificial
  probe
  misc_feature (1)..(25): SEQ ID NO: 7568; WAN024BOW; Start 147; Stop 171
atcaggctatgtattggctattgta

SEQ ID NO: 471566 - DNA, 25 bp, Artificial
  probe
  misc_feature (1)..(25): SEQ ID NO: 7568; WAN024BOW; Start 149; Stop 173
caggctatgtattggctattgtaat

SEQ ID NO: 471567 - DNA, 25 bp, Artificial
  probe
  misc_feature (1)..(25): SEQ ID NO: 7568; WAN024BOW; Start 140; Stop 164
atgaagaatcaggctatgtattggc

SEQ ID NO: 471568 - DNA, 25 bp, Artificial
  probe
  misc_feature (1)..(25): SEQ ID NO: 7568; WAN024BOW; Start 139; Stop 163
aatgaagaatcaggctatgtattgg

SEQ ID NO: 471569 - DNA, 25 bp, Artificial
  probe
  misc_feature (1)..(25): SEQ ID NO: 7568; WAN024BOW; Start 160; Stop 184
ttggctattgtaatactcatctgtt

SEQ ID NO: 471570 - DNA, 25 bp, Artificial
  probe
  misc_feature (1)..(25): SEQ ID NO: 7568; WAN024BOW; Start 159; Stop 183
attggctattgtaatactcatctgt

SEQ ID NO: 471571 - DNA, 25 bp, Artificial
  probe
  misc_feature (1)..(25): SEQ ID NO: 7568; WAN024BOW; Start 141; Stop 165
tgaagaatcaggctatgtattggct

SEQ ID NO: 471572 - DNA, 25 bp, Artificial
  probe
  misc_feature (1)..(25): SEQ ID NO: 7568; WAN024BOW; Start 137; Stop 161
acaatgaagaatcaggctatgtatt

SEQ ID NO: 471573 - DNA, 25 bp, Artificial
  probe
  misc_feature (1)..(25): SEQ ID NO: 7568; WAN024BOW; Start 134; Stop 158
aatacaatgaagaatcaggctatgt

SEQ ID NO: 471574 - DNA, 25 bp, Artificial
  probe
  misc_feature (1)..(25): SEQ ID NO: 7568; WAN024BOW; Start 150; Stop 174
aggctatgtattggctattgtaata

SEQ ID NO: 471575 - DNA, 25 bp, Artificial
  probe
  misc_feature (1)..(25): SEQ ID NO: 7568; WAN024BOW; Start 130; Stop 154
aacaaatacaatgaagaatcaggct

SEQ ID NO: 471576 - DNA, 25 bp, Artificial
  probe
  misc_feature (1)..(25): SEQ ID NO: 7568; WAN024BOW; Start 129; Stop 153
caacaaatacaatgaagaatcaggc

SEQ ID NO: 471577 - DNA, 25 bp, Artificial
  probe
  misc_feature (1)..(25): SEQ ID NO: 7568; WAN024BOW; Start 161; Stop 185
tggctattgtaatactcatctgttt

SEQ ID NO: 471578 - DNA, 25 bp, Artificial
  probe
  misc_feature (1)..(25): SEQ ID NO: 7568; WAN024BOW; Start 131; Stop 155
acaaatacaatgaagaatcaggcta

SEQ ID NO: 471579 - DNA, 25 bp, Artificial
  probe
  misc_feature (1)..(25): SEQ ID NO: 7568; WAN024BOW; Start 138; Stop 162
caatgaagaatcaggctatgtattg

SEQ ID NO: 471580 - DNA, 25 bp, Artificial
  probe
  misc_feature (1)..(25): SEQ ID NO: 7568; WAN024BOW; Start 128; Stop 152
acaacaaatacaatgaagaatcagg

SEQ ID NO: 471581 - DNA, 25 bp, Artificial
  probe
  misc_feature (1)..(25): SEQ ID NO: 7568; WAN024BOW; Start 136; Stop 160
tacaatgaagaatcaggctatgtat

SEQ ID NO: 471582 - DNA, 25 bp, Artificial
  probe
  misc_feature (1)..(25): SEQ ID NO: 7568; WAN024BOW; Start 135; Stop 159
atacaatgaagaatcaggctatgta

SEQ ID NO: 471583 - DNA, 25 bp, Artificial
  probe
  misc_feature (1)..(25): SEQ ID NO: 7568; WAN024BOW; Start 158; Stop 182
tattggctattgtaatactcatctg

SEQ ID NO: 471584 - DNA, 25 bp, Artificial
  probe
  misc_feature (1)..(25): SEQ ID NO: 7568; WAN024BOW; Start 133; Stop 157
aaatacaatgaagaatcaggctatg

SEQ ID NO: 471585 - DNA, 25 bp, Artificial
  probe
  misc_feature (1)..(25): SEQ ID NO: 7568; WAN024BOW; Start 132; Stop 156
caaatacaatgaagaatcaggctat

SEQ ID NO: 471586 - DNA, 25 bp, Artificial
  probe
  misc_feature (1)..(25): SEQ ID NO: 7568; WAN024BOW; Start 59; Stop 83
taaatgatgggaatgttagaacttt

SEQ ID NO: 471587 - DNA, 25 bp, Artificial
  probe
  misc_feature (1)..(25): SEQ ID NO: 7568; WAN024BOW; Start 58; Stop 82
ttaaatgatgggaatgttagaactt

SEQ ID NO: 471588 - DNA, 25 bp, Artificial
  probe
  misc_feature (1)..(25): SEQ ID NO: 7568; WAN024BOW; Start 66; Stop 90
tgggaatgttagaacttttgattgt

SEQ ID NO: 471589 - DNA, 25 bp, Artificial
  probe
  misc_feature (1)..(25): SEQ ID NO: 7568; WAN024BOW; Start 68; Stop 92
ggaatgttagaacttttgattgtgg

SEQ ID NO: 471590 - DNA, 25 bp, Artificial
  probe
  misc_feature (1)..(25): SEQ ID NO: 7568; WAN024BOW; Start 67; Stop 91
gggaatgttagaacttttgattgtg

SEQ ID NO: 471591 - DNA, 25 bp, Artificial
  probe
  misc_feature (1)..(25): SEQ ID NO: 7568; WAN024BOW; Start 2; Stop 26
tgcctgtcttgtattttattgatga

SEQ ID NO: 471592 - DNA, 25 bp, Artificial
  probe
  misc_feature (1)..(25): SEQ ID NO: 7569; WAN024BKA; Start 16; Stop 40
tatcttactgaccaagctagtgatg

SEQ ID NO: 471593 - DNA, 25 bp, Artificial
  probe
  misc_feature (1)..(25): SEQ ID NO: 7569; WAN024BKA; Start 15; Stop 39
gtatcttactgaccaagctagtgat

SEQ ID NO: 471594 - DNA, 25 bp, Artificial
  probe
  misc_feature (1)..(25): SEQ ID NO: 7569; WAN024BKA; Start 41; Stop 65
gatttagaataggtgatttggagcg

SEQ ID NO: 471595 - DNA, 25 bp, Artificial
  probe
  misc_feature (1)..(25): SEQ ID NO: 7569; WAN024BKA; Start 13; Stop 37
ctgtatcttactgaccaagctagtg

SEQ ID NO: 471596 - DNA, 25 bp, Artificial
  probe
  misc_feature (1)..(25): SEQ ID NO: 7569; WAN024BKA; Start 12; Stop 36
tctgtatcttactgaccaagctagt

SEQ ID NO: 471597 - DNA, 25 bp, Artificial
  probe
  misc_feature (1)..(25): SEQ ID NO: 7569; WAN024BKA; Start 42; Stop 66
atttagaataggtgatttggagcgt

SEQ ID NO: 471598 - DNA, 25 bp, Artificial
  probe
  misc_feature (1)..(25): SEQ ID NO: 7569; WAN024BKA; Start 40; Stop 64
ggatttagaataggtgatttggagc

SEQ ID NO: 471599 - DNA, 25 bp, Artificial
  probe
  misc_feature (1)..(25): SEQ ID NO: 7569; WAN024BKA; Start 14; Stop 38
tgtatcttactgaccaagctagtga

SEQ ID NO: 471600 - DNA, 25 bp, Artificial
  probe
  misc_feature (1)..(25): SEQ ID NO: 7569; WAN024BKA; Start 43; Stop 67
tttagaataggtgatttggagcgtc

SEQ ID NO: 471601 - DNA, 25 bp, Artificial
  probe
  misc_feature (1)..(25): SEQ ID NO: 7569; WAN024BKA; Start 11; Stop 35
gtctgtatcttactgaccaagctag

SEQ ID NO: 471602 - DNA, 25 bp, Artificial
  probe
  misc_feature (1)..(25): SEQ ID NO: 7569; WAN024BKA; Start 10; Stop 34
agtctgtatcttactgaccaagcta

SEQ ID NO: 471603 - DNA, 25 bp, Artificial
  probe
  misc_feature (1)..(25): SEQ ID NO: 7569; WAN024BKA; Start 39; Stop 63
tggatttagaataggtgatttggag

SEQ ID NO: 471604 - DNA, 25 bp, Artificial
  probe
  misc_feature (1)..(25): SEQ ID NO: 7569; WAN024BKA; Start 31; Stop 55
gctagtgatggatttagaataggtg

SEQ ID NO: 471605 - DNA, 25 bp, Artificial
  probe
  misc_feature (1)..(25): SEQ ID NO: 7569; WAN024BKA; Start 38; Stop 62
atggatttagaataggtgatttgga

SEQ ID NO: 471606 - DNA, 25 bp, Artificial
  probe
  misc_feature (1)..(25): SEQ ID NO: 7569; WAN024BKA; Start 20; Stop 44
ttactgaccaagctagtgatggatt

SEQ ID NO: 471607 - DNA, 25 bp, Artificial
  probe
  misc_feature (1)..(25): SEQ ID NO: 7569; WAN024BKA; Start 37; Stop 61
gatggatttagaataggtgatttgg

SEQ ID NO: 471608 - DNA, 25 bp, Artificial
  probe
  misc_feature (1)..(25): SEQ ID NO: 7569; WAN024BKA; Start 34; Stop 58
agtgatggatttagaataggtgatt

SEQ ID NO: 471609 - DNA, 25 bp, Artificial
  probe
  misc_feature (1)..(25): SEQ ID NO: 7569; WAN024BKA; Start 19; Stop 43
cttactgaccaagctagtgatggat

SEQ ID NO: 471610 - DNA, 25 bp, Artificial
  probe
  misc_feature (1)..(25): SEQ ID NO: 7569; WAN024BKA; Start 17; Stop 41
atcttactgaccaagctagtgatgg

SEQ ID NO: 471611 - DNA, 25 bp, Artificial
  probe
  misc_feature (1)..(25): SEQ ID NO: 7569; WAN024BKA; Start 30; Stop 54
agctagtgatggatttagaataggt

SEQ ID NO: 471612 - DNA, 25 bp, Artificial
  probe
  misc_feature (1)..(25): SEQ ID NO: 7569; WAN024BKA; Start 32; Stop 56
ctagtgatggatttagaataggtga

SEQ ID NO: 471613 - DNA, 25 bp, Artificial
  probe
  misc_feature (1)..(25): SEQ ID NO: 7569; WAN024BKA; Start 36; Stop 60
tgatggatttagaataggtgatttg

SEQ ID NO: 471614 - DNA, 25 bp, Artificial
  probe
  misc_feature (1)..(25): SEQ ID NO: 7569; WAN024BKA; Start 35; Stop 59
gtgatggatttagaataggtgattt

SEQ ID NO: 471615 - DNA, 25 bp, Artificial
  probe
  misc_feature (1)..(25): SEQ ID NO: 7569; WAN024BKA; Start 29; Stop 53
aagctagtgatggatttagaatagg

SEQ ID NO: 471616 - DNA, 25 bp, Artificial
  probe
  misc_feature (1)..(25): SEQ ID NO: 7569; WAN024BKA; Start 18; Stop 42
tcttactgaccaagctagtgatgga

SEQ ID NO: 471617 - DNA, 25 bp, Artificial
  probe
  misc_feature (1)..(25): SEQ ID NO: 7569; WAN024BKA; Start 33; Stop 57
tagtgatggatttagaataggtgat

SEQ ID NO: 471618 - DNA, 25 bp, Artificial
  probe
  misc_feature (1)..(25): SEQ ID NO: 7569; WAN024BKA; Start 26; Stop 50
accaagctagtgatggatttagaat

SEQ ID NO: 471619 - DNA, 25 bp, Artificial
  probe
  misc_feature (1)..(25): SEQ ID NO: 7569; WAN024BKA; Start 25; Stop 49
gaccaagctagtgatggatttagaa

SEQ ID NO: 471620 - DNA, 25 bp, Artificial
  probe
  misc_feature (1)..(25): SEQ ID NO: 7569; WAN024BKA; Start 44; Stop 68
ttagaataggtgatttggagcgtcc

SEQ ID NO: 471621 - DNA, 25 bp, Artificial
  probe
  misc_feature (1)..(25): SEQ ID NO: 7569; WAN024BKA; Start 23; Stop 47
ctgaccaagctagtgatggatttag

SEQ ID NO: 471622 - DNA, 25 bp, Artificial
  probe
  misc_feature (1)..(25): SEQ ID NO: 7569; WAN024BKA; Start 24; Stop 48
tgaccaagctagtgatggatttaga

SEQ ID NO: 471623 - DNA, 25 bp, Artificial
  probe
  misc_feature (1)..(25): SEQ ID NO: 7569; WAN024BKA; Start 22; Stop 46
actgaccaagctagtgatggattta

SEQ ID NO: 471624 - DNA, 25 bp, Artificial
  probe
  misc_feature (1)..(25): SEQ ID NO: 7569; WAN024BKA; Start 21; Stop 45
tactgaccaagctagtgatggattt

SEQ ID NO: 471625 - DNA, 25 bp, Artificial
  probe
  misc_feature (1)..(25): SEQ ID NO: 7573; WAN024BZ7; Start 28; Stop 52
aacaacggtattattacttctggaa

SEQ ID NO: 471626 - DNA, 25 bp, Artificial
  probe
  misc_feature (1)..(25): SEQ ID NO: 7573; WAN024BZ7; Start 27; Stop 51
taacaacggtattattacttctgga

SEQ ID NO: 471627 - DNA, 25 bp, Artificial
  probe
  misc_feature (1)..(25): SEQ ID NO: 7573; WAN024BZ7; Start 29; Stop 53
acaacggtattattacttctggaaa

SEQ ID NO: 471628 - DNA, 25 bp, Artificial
  probe
  misc_feature (1)..(25): SEQ ID NO: 7573; WAN024BZ7; Start 26; Stop 50
ataacaacggtattattacttctgg

SEQ ID NO: 471629 - DNA, 25 bp, Artificial
  probe
  misc_feature (1)..(25): SEQ ID NO: 7573; WAN024BZ7; Start 5; Stop 29
ggagcagggataccattgtatataa

SEQ ID NO: 471630 - DNA, 25 bp, Artificial
  probe
  misc_feature (1)..(25): SEQ ID NO: 7573; WAN024BZ7; Start 7; Stop 31
agcagggataccattgtatataaca

SEQ ID NO: 471631 - DNA, 25 bp, Artificial
  probe
  misc_feature (1)..(25): SEQ ID NO: 7573; WAN024BZ7; Start 4; Stop 28
cggagcagggataccattgtatata

SEQ ID NO: 471632 - DNA, 25 bp, Artificial
  probe
  misc_feature (1)..(25): SEQ ID NO: 7573; WAN024BZ7; Start 6; Stop 30
gagcagggataccattgtatataac

SEQ ID NO: 471633 - DNA, 25 bp, Artificial
  probe
  misc_feature (1)..(25): SEQ ID NO: 7573; WAN024BZ7; Start 12; Stop 36
ggataccattgtatataacaacggt

SEQ ID NO: 471634 - DNA, 25 bp, Artificial
  probe
  misc_feature (1)..(25): SEQ ID NO: 7573; WAN024BZ7; Start 41; Stop 65
ttacttctggaaaaccttctgtcaa

SEQ ID NO: 471635 - DNA, 25 bp, Artificial
  probe
  misc_feature (1)..(25): SEQ ID NO: 7573; WAN024BZ7; Start 40; Stop 64
attacttctggaaaaccttctgtca

SEQ ID NO: 471636 - DNA, 25 bp, Artificial
  probe
  misc_feature (1)..(25): SEQ ID NO: 7573; WAN024BZ7; Start 42; Stop 66
tacttctggaaaaccttctgtcaag

SEQ ID NO: 471637 - DNA, 25 bp, Artificial
  probe
  misc_feature (1)..(25): SEQ ID NO: 7573; WAN024BZ7; Start 39; Stop 63
tattacttctggaaaaccttctgtc

SEQ ID NO: 471638 - DNA, 25 bp, Artificial
  probe
  misc_feature (1)..(25): SEQ ID NO: 7573; WAN024BZ7; Start 44; Stop 68
cttctggaaaaccttctgtcaagag

SEQ ID NO: 471639 - DNA, 25 bp, Artificial
  probe
  misc_feature (1)..(25): SEQ ID NO: 7573; WAN024BZ7; Start 50; Stop 74
gaaaaccttctgtcaagagccattt

SEQ ID NO: 471640 - DNA, 25 bp, Artificial
  probe
  misc_feature (1)..(25): SEQ ID NO: 7573; WAN024BZ7; Start 38; Stop 62
ttattacttctggaaaaccttctgt

SEQ ID NO: 471641 - DNA, 25 bp, Artificial
  probe
  misc_feature (1)..(25): SEQ ID NO: 7573; WAN024BZ7; Start 43; Stop 67
acttctggaaaaccttctgtcaaga

SEQ ID NO: 471642 - DNA, 25 bp, Artificial
  probe
  misc_feature (1)..(25): SEQ ID NO: 7573; WAN024BZ7; Start 11; Stop 35
gggataccattgtatataacaacgg

SEQ ID NO: 471643 - DNA, 25 bp, Artificial
  probe
  misc_feature (1)..(25): SEQ ID NO: 7573; WAN024BZ7; Start 51; Stop 75
aaaaccttctgtcaagagccatttg

SEQ ID NO: 471644 - DNA, 25 bp, Artificial
  probe
  misc_feature (1)..(25): SEQ ID NO: 7573; WAN024BZ7; Start 8; Stop 32
gcagggataccattgtatataacaa

SEQ ID NO: 471645 - DNA, 25 bp, Artificial
  probe
  misc_feature (1)..(25): SEQ ID NO: 7573; WAN024BZ7; Start 31; Stop 55
aacggtattattacttctggaaaac

SEQ ID NO: 471646 - DNA, 25 bp, Artificial
  probe
  misc_feature (1)..(25): SEQ ID NO: 7573; WAN024BZ7; Start 30; Stop 54
caacggtattattacttctggaaaa

SEQ ID NO: 471647 - DNA, 25 bp, Artificial
  probe
  misc_feature (1)..(25): SEQ ID NO: 7573; WAN024BZ7; Start 52; Stop 76
aaaccttctgtcaagagccatttgc

SEQ ID NO: 471648 - DNA, 25 bp, Artificial
  probe
  misc_feature (1)..(25): SEQ ID NO: 7573; WAN024BZ7; Start 10; Stop 34
agggataccattgtatataacaacg

SEQ ID NO: 471649 - DNA, 25 bp, Artificial
  probe
  misc_feature (1)..(25): SEQ ID NO: 7573; WAN024BZ7; Start 32; Stop 56
acggtattattacttctggaaaacc

SEQ ID NO: 471650 - DNA, 25 bp, Artificial
  probe
  misc_feature (1)..(25): SEQ ID NO: 7573; WAN024BZ7; Start 33; Stop 57
cggtattattacttctggaaaacct

SEQ ID NO: 471651 - DNA, 25 bp, Artificial
  probe
  misc_feature (1)..(25): SEQ ID NO: 7573; WAN024BZ7; Start 37; Stop 61
attattacttctggaaaaccttctg

SEQ ID NO: 471652 - DNA, 25 bp, Artificial
  probe
  misc_feature (1)..(25): SEQ ID NO: 7573; WAN024BZ7; Start 3; Stop 27
gcggagcagggataccattgtatat

SEQ ID NO: 471653 - DNA, 25 bp, Artificial
  probe
  misc_feature (1)..(25): SEQ ID NO: 7573; WAN024BZ7; Start 13; Stop 37
gataccattgtatataacaacggta

SEQ ID NO: 471654 - DNA, 25 bp, Artificial
  probe
  misc_feature (1)..(25): SEQ ID NO: 7573; WAN024BZ7; Start 45; Stop 69
ttctggaaaaccttctgtcaagagc

SEQ ID NO: 471655 - DNA, 25 bp, Artificial
  probe
  misc_feature (1)..(25): SEQ ID NO: 7573; WAN024BZ7; Start 57; Stop 81
ttctgtcaagagccatttgcttctc

SEQ ID NO: 471656 - DNA, 25 bp, Artificial
  probe
  misc_feature (1)..(25): SEQ ID NO: 7573; WAN024BZ7; Start 56; Stop 80
cttctgtcaagagccatttgcttct

SEQ ID NO: 471657 - DNA, 25 bp, Artificial
  probe
  misc_feature (1)..(25): SEQ ID NO: 7573; WAN024BZ7; Start 49; Stop 73
ggaaaaccttctgtcaagagccatt

SEQ ID NO: 471658 - DNA, 25 bp, Artificial
  probe
  misc_feature (1)..(25): SEQ ID NO: 7574; WAN024BS2; Start 140; Stop 164
taggtactactgtagcaagttctgt

SEQ ID NO: 471659 - DNA, 25 bp, Artificial
  probe
  misc_feature (1)..(25): SEQ ID NO: 7574; WAN024BS2; Start 141; Stop 165
aggtactactgtagcaagttctgtc

SEQ ID NO: 471660 - DNA, 25 bp, Artificial
  probe
  misc_feature (1)..(25): SEQ ID NO: 7574; WAN024BS2; Start 184; Stop 208
aaactgaaagcgactaaacgaatta

SEQ ID NO: 471661 - DNA, 25 bp, Artificial
  probe
  misc_feature (1)..(25): SEQ ID NO: 7574; WAN024BS2; Start 249; Stop 273
ctatgtttctattagccacgcattc

SEQ ID NO: 471662 - DNA, 25 bp, Artificial
  probe
  misc_feature (1)..(25): SEQ ID NO: 7574; WAN024BS2; Start 204; Stop 228
aattagtagagtccttcaaacacct

SEQ ID NO: 471663 - DNA, 25 bp, Artificial
  probe
  misc_feature (1)..(25): SEQ ID NO: 7574; WAN024BS2; Start 248; Stop 272
actatgtttctattagccacgcatt

SEQ ID NO: 471664 - DNA, 25 bp, Artificial
  probe
  misc_feature (1)..(25): SEQ ID NO: 7574; WAN024BS2; Start 35; Stop 59
taactgtttctactgtttccaacca

SEQ ID NO: 471665 - DNA, 25 bp, Artificial
  probe
  misc_feature (1)..(25): SEQ ID NO: 7574; WAN024BS2; Start 34; Stop 58
gtaactgtttctactgtttccaacc

SEQ ID NO: 471666 - DNA, 25 bp, Artificial
  probe
  misc_feature (1)..(25): SEQ ID NO: 7574; WAN024BS2; Start 201; Stop 225
acgaattagtagagtccttcaaaca

SEQ ID NO: 471667 - DNA, 25 bp, Artificial
  probe
  misc_feature (1)..(25): SEQ ID NO: 7574; WAN024BS2; Start 202; Stop 226
cgaattagtagagtccttcaaacac

SEQ ID NO: 471668 - DNA, 25 bp, Artificial
  probe
  misc_feature (1)..(25): SEQ ID NO: 7574; WAN024BS2; Start 247; Stop 271
gactatgtttctattagccacgcat

SEQ ID NO: 471669 - DNA, 25 bp, Artificial
  probe
  misc_feature (1)..(25): SEQ ID NO: 7574; WAN024BS2; Start 203; Stop 227
gaattagtagagtccttcaaacacc

SEQ ID NO: 471670 - DNA, 25 bp, Artificial
  probe
  misc_feature (1)..(25): SEQ ID NO: 7574; WAN024BS2; Start 250; Stop 274
tatgtttctattagccacgcattcc

SEQ ID NO: 471671 - DNA, 25 bp, Artificial
  probe
  misc_feature (1)..(25): SEQ ID NO: 7574; WAN024BS2; Start 139; Stop 163
gtaggtactactgtagcaagttctg

SEQ ID NO: 471672 - DNA, 25 bp, Artificial
  probe
  misc_feature (1)..(25): SEQ ID NO: 7574; WAN024BS2; Start 205; Stop 229
attagtagagtccttcaaacacctc

SEQ ID NO: 471673 - DNA, 25 bp, Artificial
  probe
  misc_feature (1)..(25): SEQ ID NO: 7574; WAN024BS2; Start 200; Stop 224
aacgaattagtagagtccttcaaac

SEQ ID NO: 471674 - DNA, 25 bp, Artificial
  probe
  misc_feature (1)..(25): SEQ ID NO: 7574; WAN024BS2; Start 142; Stop 166
ggtactactgtagcaagttctgtcg

SEQ ID NO: 471675 - DNA, 25 bp, Artificial
  probe
  misc_feature (1)..(25): SEQ ID NO: 7574; WAN024BS2; Start 143; Stop 167
gtactactgtagcaagttctgtcga

SEQ ID NO: 471676 - DNA, 25 bp, Artificial
  probe
  misc_feature (1)..(25): SEQ ID NO: 7574; WAN024BS2; Start 36; Stop 60
aactgtttctactgtttccaaccac

SEQ ID NO: 471677 - DNA, 25 bp, Artificial
  probe
  misc_feature (1)..(25): SEQ ID NO: 7574; WAN024BS2; Start 185; Stop 209
aactgaaagcgactaaacgaattag

SEQ ID NO: 471678 - DNA, 25 bp, Artificial
  probe
  misc_feature (1)..(25): SEQ ID NO: 7574; WAN024BS2; Start 40; Stop 64
gtttctactgtttccaaccaccaaa

SEQ ID NO: 471679 - DNA, 25 bp, Artificial
  probe
  misc_feature (1)..(25): SEQ ID NO: 7574; WAN024BS2; Start 199; Stop 223
aaacgaattagtagagtccttcaaa

SEQ ID NO: 471680 - DNA, 25 bp, Artificial
  probe
  misc_feature (1)..(25): SEQ ID NO: 7574; WAN024BS2; Start 138; Stop 162
cgtaggtactactgtagcaagttct

SEQ ID NO: 471681 - DNA, 25 bp, Artificial
  probe
  misc_feature (1)..(25): SEQ ID NO: 7574; WAN024BS2; Start 18; Stop 42
acgtactcaagaagaagtaactgtt

SEQ ID NO: 471682 - DNA, 25 bp, Artificial
  probe
  misc_feature (1)..(25): SEQ ID NO: 7574; WAN024BS2; Start 16; Stop 40
tcacgtactcaagaagaagtaactg

SEQ ID NO: 471683 - DNA, 25 bp, Artificial
  probe
  misc_feature (1)..(25): SEQ ID NO: 7574; WAN024BS2; Start 15; Stop 39
ttcacgtactcaagaagaagtaact

SEQ ID NO: 471684 - DNA, 25 bp, Artificial
  probe
  misc_feature (1)..(25): SEQ ID NO: 7574; WAN024BS2; Start 17; Stop 41
cacgtactcaagaagaagtaactgt

SEQ ID NO: 471685 - DNA, 25 bp, Artificial
  probe
  misc_feature (1)..(25): SEQ ID NO: 7574; WAN024BS2; Start 244; Stop 268
ttcgactatgtttctattagccacg

SEQ ID NO: 471686 - DNA, 25 bp, Artificial
  probe
  misc_feature (1)..(25): SEQ ID NO: 7574; WAN024BS2; Start 243; Stop 267
tttcgactatgtttctattagccac

SEQ ID NO: 471687 - DNA, 25 bp, Artificial
  probe
  misc_feature (1)..(25): SEQ ID NO: 7574; WAN024BS2; Start 33; Stop 57
agtaactgtttctactgtttccaac

SEQ ID NO: 471688 - DNA, 25 bp, Artificial
  probe
  misc_feature (1)..(25): SEQ ID NO: 7574; WAN024BS2; Start 198; Stop 222
taaacgaattagtagagtccttcaa

SEQ ID NO: 471689 - DNA, 25 bp, Artificial
  probe
  misc_feature (1)..(25): SEQ ID NO: 7574; WAN024BS2; Start 137; Stop 161
ccgtaggtactactgtagcaagttc

SEQ ID NO: 471690 - DNA, 25 bp, Artificial
  probe
  misc_feature (1)..(25): SEQ ID NO: 7574; WAN024BS2; Start 31; Stop 55
gaagtaactgtttctactgtttcca

SEQ ID NO: 471691 - DNA, 25 bp, Artificial
  probe
  misc_feature (1)..(25): SEQ ID NO: 7575; WAN024C3D; Start 53; Stop 77
ttcagcttcagccaagttacctcag

SEQ ID NO: 471692 - DNA, 25 bp, Artificial
  probe
  misc_feature (1)..(25): SEQ ID NO: 7575; WAN024C3D; Start 52; Stop 76
cttcagcttcagccaagttacctca

SEQ ID NO: 471693 - DNA, 25 bp, Artificial
  probe
  misc_feature (1)..(25): SEQ ID NO: 7576; WAN024F3A; Start 181; Stop 205
aagagtcacctccttgattcctata

SEQ ID NO: 471694 - DNA, 25 bp, Artificial
  probe
  misc_feature (1)..(25): SEQ ID NO: 7576; WAN024F3A; Start 180; Stop 204
taagagtcacctccttgattcctat

SEQ ID NO: 471695 - DNA, 25 bp, Artificial
  probe
  misc_feature (1)..(25): SEQ ID NO: 7576; WAN024F3A; Start 179; Stop 203
ataagagtcacctccttgattccta

SEQ ID NO: 471696 - DNA, 25 bp, Artificial
  probe
  misc_feature (1)..(25): SEQ ID NO: 7576; WAN024F3A; Start 138; Stop 162
gtacttctaccacaattccatccaa

SEQ ID NO: 471697 - DNA, 25 bp, Artificial
  probe
  misc_feature (1)..(25): SEQ ID NO: 7576; WAN024F3A; Start 268; Stop 292
ttgtatgtggctaatattccgtctc

SEQ ID NO: 471698 - DNA, 25 bp, Artificial
  probe
  misc_feature (1)..(25): SEQ ID NO: 7576; WAN024F3A; Start 178; Stop 202
cataagagtcacctccttgattcct

SEQ ID NO: 471699 - DNA, 25 bp, Artificial
  probe
  misc_feature (1)..(25): SEQ ID NO: 7576; WAN024F3A; Start 177; Stop 201
ccataagagtcacctccttgattcc

SEQ ID NO: 471700 - DNA, 25 bp, Artificial
  probe
  misc_feature (1)..(25): SEQ ID NO: 7576; WAN024F3A; Start 139; Stop 163
tacttctaccacaattccatccaaa

SEQ ID NO: 471701 - DNA, 25 bp, Artificial
  probe
  misc_feature (1)..(25): SEQ ID NO: 7576; WAN024F3A; Start 182; Stop 206
agagtcacctccttgattcctatag

SEQ ID NO: 471702 - DNA, 25 bp, Artificial
  probe
  misc_feature (1)..(25): SEQ ID NO: 7576; WAN024F3A; Start 269; Stop 293
tgtatgtggctaatattccgtctcg

SEQ ID NO: 471703 - DNA, 25 bp, Artificial
  probe
  misc_feature (1)..(25): SEQ ID NO: 7576; WAN024F3A; Start 141; Stop 165
cttctaccacaattccatccaaaga

SEQ ID NO: 471704 - DNA, 25 bp, Artificial
  probe
  misc_feature (1)..(25): SEQ ID NO: 7576; WAN024F3A; Start 140; Stop 164
acttctaccacaattccatccaaag

SEQ ID NO: 471705 - DNA, 25 bp, Artificial
  probe
  misc_feature (1)..(25): SEQ ID NO: 7576; WAN024F3A; Start 297; Stop 321
cggaatgtacgaggtaaatagagtt

SEQ ID NO: 471706 - DNA, 25 bp, Artificial
  probe
  misc_feature (1)..(25): SEQ ID NO: 7576; WAN024F3A; Start 142; Stop 166
ttctaccacaattccatccaaagac

SEQ ID NO: 471707 - DNA, 25 bp, Artificial
  probe
  misc_feature (1)..(25): SEQ ID NO: 7576; WAN024F3A; Start 176; Stop 200
gccataagagtcacctccttgattc

SEQ ID NO: 471708 - DNA, 25 bp, Artificial
  probe
  misc_feature (1)..(25): SEQ ID NO: 7576; WAN024F3A; Start 144; Stop 168
ctaccacaattccatccaaagacac

SEQ ID NO: 471709 - DNA, 25 bp, Artificial
  probe
  misc_feature (1)..(25): SEQ ID NO: 7576; WAN024F3A; Start 15; Stop 39
gactactttgaagttggaacatctc

SEQ ID NO: 471710 - DNA, 25 bp, Artificial
  probe
  misc_feature (1)..(25): SEQ ID NO: 7576; WAN024F3A; Start 267; Stop 291
tttgtatgtggctaatattccgtct

SEQ ID NO: 471711 - DNA, 25 bp, Artificial
  probe
  misc_feature (1)..(25): SEQ ID NO: 7576; WAN024F3A; Start 143; Stop 167
tctaccacaattccatccaaagaca

SEQ ID NO: 471712 - DNA, 25 bp, Artificial
  probe
  misc_feature (1)..(25): SEQ ID NO: 7576; WAN024F3A; Start 147; Stop 171
ccacaattccatccaaagacacaaa

SEQ ID NO: 471713 - DNA, 25 bp, Artificial
  probe
  misc_feature (1)..(25): SEQ ID NO: 7576; WAN024F3A; Start 298; Stop 322
ggaatgtacgaggtaaatagagttt

SEQ ID NO: 471714 - DNA, 25 bp, Artificial
  probe
  misc_feature (1)..(25): SEQ ID NO: 7576; WAN024F3A; Start 175; Stop 199
agccataagagtcacctccttgatt

SEQ ID NO: 471715 - DNA, 25 bp, Artificial
  probe
  misc_feature (1)..(25): SEQ ID NO: 7576; WAN024F3A; Start 14; Stop 38
cgactactttgaagttggaacatct

SEQ ID NO: 471716 - DNA, 25 bp, Artificial
  probe
  misc_feature (1)..(25): SEQ ID NO: 7576; WAN024F3A; Start 145; Stop 169
taccacaattccatccaaagacaca

SEQ ID NO: 471717 - DNA, 25 bp, Artificial
  probe
  misc_feature (1)..(25): SEQ ID NO: 7576; WAN024F3A; Start 137; Stop 161
agtacttctaccacaattccatcca

SEQ ID NO: 471718 - DNA, 25 bp, Artificial
  probe
  misc_feature (1)..(25): SEQ ID NO: 7576; WAN024F3A; Start 18; Stop 42
tactttgaagttggaacatctcctc

SEQ ID NO: 471719 - DNA, 25 bp, Artificial
  probe
  misc_feature (1)..(25): SEQ ID NO: 7576; WAN024F3A; Start 17; Stop 41
ctactttgaagttggaacatctcct

SEQ ID NO: 471720 - DNA, 25 bp, Artificial
  probe
  misc_feature (1)..(25): SEQ ID NO: 7576; WAN024F3A; Start 16; Stop 40
actactttgaagttggaacatctcc

SEQ ID NO: 471721 - DNA, 25 bp, Artificial
  probe
  misc_feature (1)..(25): SEQ ID NO: 7576; WAN024F3A; Start 206; Stop 230
ggctgattataacaagaatagctga

SEQ ID NO: 471722 - DNA, 25 bp, Artificial
  probe
  misc_feature (1)..(25): SEQ ID NO: 7576; WAN024F3A; Start 205; Stop 229
aggctgattataacaagaatagctg

SEQ ID NO: 471723 - DNA, 25 bp, Artificial
  probe
  misc_feature (1)..(25): SEQ ID NO: 7576; WAN024F3A; Start 51; Stop 75
agcgttccataacaaactgactctt

SEQ ID NO: 471724 - DNA, 25 bp, Artificial
  probe
  misc_feature (1)..(25): SEQ ID NO: 7576; WAN024F3A; Start 44; Stop 68
aactgagagcgttccataacaaact

SEQ ID NO: 471725 - DNA, 25 bp, Artificial
  probe
  misc_feature (1)..(25): SEQ ID NO: 7576; WAN024F3A; Start 271; Stop 295
tatgtggctaatattccgtctcgct

SEQ ID NO: 471726 - DNA, 25 bp, Artificial
  probe
  misc_feature (1)..(25): SEQ ID NO: 7577; WAN024BU7; Start 123; Stop 147
gggtgatgtcaatattctcaatgtt

SEQ ID NO: 471727 - DNA, 25 bp, Artificial
  probe
  misc_feature (1)..(25): SEQ ID NO: 7577; WAN024BU7; Start 115; Stop 139
catgaaaggggtgatgtcaatattc

SEQ ID NO: 471728 - DNA, 25 bp, Artificial
  probe
  misc_feature (1)..(25): SEQ ID NO: 7577; WAN024BU7; Start 120; Stop 144
aaggggtgatgtcaatattctcaat

SEQ ID NO: 471729 - DNA, 25 bp, Artificial
  probe
  misc_feature (1)..(25): SEQ ID NO: 7577; WAN024BU7; Start 119; Stop 143
aaaggggtgatgtcaatattctcaa

SEQ ID NO: 471730 - DNA, 25 bp, Artificial
  probe
  misc_feature (1)..(25): SEQ ID NO: 7577; WAN024BU7; Start 116; Stop 140
atgaaaggggtgatgtcaatattct

SEQ ID NO: 471731 - DNA, 25 bp, Artificial
  probe
  misc_feature (1)..(25): SEQ ID NO: 7577; WAN024BU7; Start 118; Stop 142
gaaaggggtgatgtcaatattctca

SEQ ID NO: 471732 - DNA, 25 bp, Artificial
  probe
  misc_feature (1)..(25): SEQ ID NO: 7577; WAN024BU7; Start 117; Stop 141
tgaaaggggtgatgtcaatattctc

SEQ ID NO: 471733 - DNA, 25 bp, Artificial
  probe
  misc_feature (1)..(25): SEQ ID NO: 7577; WAN024BU7; Start 121; Stop 145
aggggtgatgtcaatattctcaatg

SEQ ID NO: 471734 - DNA, 25 bp, Artificial
  probe
  misc_feature (1)..(25): SEQ ID NO: 7577; WAN024BU7; Start 122; Stop 146
ggggtgatgtcaatattctcaatgt

SEQ ID NO: 471735 - DNA, 25 bp, Artificial
  probe
  misc_feature (1)..(25): SEQ ID NO: 7577; WAN024BU7; Start 114; Stop 138
ccatgaaaggggtgatgtcaatatt

SEQ ID NO: 471736 - DNA, 25 bp, Artificial
  probe
  misc_feature (1)..(25): SEQ ID NO: 7577; WAN024BU7; Start 88; Stop 112
gcctcttttctataccctattttac

SEQ ID NO: 471737 - DNA, 25 bp, Artificial
  probe
  misc_feature (1)..(25): SEQ ID NO: 7577; WAN024BU7; Start 99; Stop 123
ataccctattttacaccatgaaagg

SEQ ID NO: 471738 - DNA, 25 bp, Artificial
  probe
  misc_feature (1)..(25): SEQ ID NO: 7577; WAN024BU7; Start 26; Stop 50
aatctccctcgccaaagtttgattg

SEQ ID NO: 471739 - DNA, 25 bp, Artificial
  probe
  misc_feature (1)..(25): SEQ ID NO: 7577; WAN024BU7; Start 25; Stop 49
caatctccctcgccaaagtttgatt

SEQ ID NO: 471740 - DNA, 25 bp, Artificial
  probe
  misc_feature (1)..(25): SEQ ID NO: 7577; WAN024BU7; Start 45; Stop 69
tgattgtgaagctcacccttataaa

SEQ ID NO: 471741 - DNA, 25 bp, Artificial
  probe
  misc_feature (1)..(25): SEQ ID NO: 7577; WAN024BU7; Start 44; Stop 68
ttgattgtgaagctcacccttataa

SEQ ID NO: 471742 - DNA, 25 bp, Artificial
  probe
  misc_feature (1)..(25): SEQ ID NO: 7577; WAN024BU7; Start 43; Stop 67
tttgattgtgaagctcacccttata

SEQ ID NO: 471743 - DNA, 25 bp, Artificial
  probe
  misc_feature (1)..(25): SEQ ID NO: 7577; WAN024BU7; Start 113; Stop 137
accatgaaaggggtgatgtcaatat

SEQ ID NO: 471744 - DNA, 25 bp, Artificial
  probe
  misc_feature (1)..(25): SEQ ID NO: 7577; WAN024BU7; Start 96; Stop 120
tctataccctattttacaccatgaa

SEQ ID NO: 471745 - DNA, 25 bp, Artificial
  probe
  misc_feature (1)..(25): SEQ ID NO: 7577; WAN024BU7; Start 95; Stop 119
ttctataccctattttacaccatga

SEQ ID NO: 471746 - DNA, 25 bp, Artificial
  probe
  misc_feature (1)..(25): SEQ ID NO: 7577; WAN024BU7; Start 92; Stop 116
cttttctataccctattttacacca

SEQ ID NO: 471747 - DNA, 25 bp, Artificial
  probe
  misc_feature (1)..(25): SEQ ID NO: 7577; WAN024BU7; Start 27; Stop 51
atctccctcgccaaagtttgattgt

SEQ ID NO: 471748 - DNA, 25 bp, Artificial
  probe
  misc_feature (1)..(25): SEQ ID NO: 7577; WAN024BU7; Start 24; Stop 48
acaatctccctcgccaaagtttgat

SEQ ID NO: 471749 - DNA, 25 bp, Artificial
  probe
  misc_feature (1)..(25): SEQ ID NO: 7577; WAN024BU7; Start 42; Stop 66
gtttgattgtgaagctcacccttat

SEQ ID NO: 471750 - DNA, 25 bp, Artificial
  probe
  misc_feature (1)..(25): SEQ ID NO: 7577; WAN024BU7; Start 31; Stop 55
ccctcgccaaagtttgattgtgaag

SEQ ID NO: 471751 - DNA, 25 bp, Artificial
  probe
  misc_feature (1)..(25): SEQ ID NO: 7577; WAN024BU7; Start 34; Stop 58
tcgccaaagtttgattgtgaagctc

SEQ ID NO: 471752 - DNA, 25 bp, Artificial
  probe
  misc_feature (1)..(25): SEQ ID NO: 7577; WAN024BU7; Start 33; Stop 57
ctcgccaaagtttgattgtgaagct

SEQ ID NO: 471753 - DNA, 25 bp, Artificial
  probe
  misc_feature (1)..(25): SEQ ID NO: 7577; WAN024BU7; Start 91; Stop 115
tcttttctataccctattttacacc

SEQ ID NO: 471754 - DNA, 25 bp, Artificial
  probe
  misc_feature (1)..(25): SEQ ID NO: 7577; WAN024BU7; Start 98; Stop 122
tataccctattttacaccatgaaag

SEQ ID NO: 471755 - DNA, 25 bp, Artificial
  probe
  misc_feature (1)..(25): SEQ ID NO: 7577; WAN024BU7; Start 97; Stop 121
ctataccctattttacaccatgaaa

SEQ ID NO: 471756 - DNA, 25 bp, Artificial
  probe
  misc_feature (1)..(25): SEQ ID NO: 7577; WAN024BU7; Start 94; Stop 118
tttctataccctattttacaccatg

SEQ ID NO: 471757 - DNA, 25 bp, Artificial
  probe
  misc_feature (1)..(25): SEQ ID NO: 7577; WAN024BU7; Start 89; Stop 113
cctcttttctataccctattttaca

SEQ ID NO: 471758 - DNA, 25 bp, Artificial
  probe
  misc_feature (1)..(25): SEQ ID NO: 7577; WAN024BU7; Start 41; Stop 65
agtttgattgtgaagctcaccctta

SEQ ID NO: 471759 - DNA, 25 bp, Artificial
  probe
  misc_feature (1)..(25): SEQ ID NO: 7578; WAN024ER8; Start 187; Stop 211
acttctgttggaaccttgataatct

SEQ ID NO: 471760 - DNA, 25 bp, Artificial
  probe
  misc_feature (1)..(25): SEQ ID NO: 7578; WAN024ER8; Start 186; Stop 210
cacttctgttggaaccttgataatc

SEQ ID NO: 471761 - DNA, 25 bp, Artificial
  probe
  misc_feature (1)..(25): SEQ ID NO: 7578; WAN024ER8; Start 188; Stop 212
cttctgttggaaccttgataatctt

SEQ ID NO: 471762 - DNA, 25 bp, Artificial
  probe
  misc_feature (1)..(25): SEQ ID NO: 7578; WAN024ER8; Start 185; Stop 209
ccacttctgttggaaccttgataat

SEQ ID NO: 471763 - DNA, 25 bp, Artificial
  probe
  misc_feature (1)..(25): SEQ ID NO: 7578; WAN024ER8; Start 43; Stop 67
ttggaatcatataggaaatggctgt

SEQ ID NO: 471764 - DNA, 25 bp, Artificial
  probe
  misc_feature (1)..(25): SEQ ID NO: 7578; WAN024ER8; Start 45; Stop 69
ggaatcatataggaaatggctgtca

SEQ ID NO: 471765 - DNA, 25 bp, Artificial
  probe
  misc_feature (1)..(25): SEQ ID NO: 7578; WAN024ER8; Start 44; Stop 68
tggaatcatataggaaatggctgtc

SEQ ID NO: 471766 - DNA, 25 bp, Artificial
  probe
  misc_feature (1)..(25): SEQ ID NO: 7578; WAN024ER8; Start 222; Stop 246
aaagcgttccataccagaaatctta

SEQ ID NO: 471767 - DNA, 25 bp, Artificial
  probe
  misc_feature (1)..(25): SEQ ID NO: 7578; WAN024ER8; Start 223; Stop 247
aagcgttccataccagaaatcttaa

SEQ ID NO: 471768 - DNA, 25 bp, Artificial
  probe
  misc_feature (1)..(25): SEQ ID NO: 7578; WAN024ER8; Start 4; Stop 28
ctaaaccaatggcaactaagaatcc

SEQ ID NO: 471769 - DNA, 25 bp, Artificial
  probe
  misc_feature (1)..(25): SEQ ID NO: 7578; WAN024ER8; Start 5; Stop 29
taaaccaatggcaactaagaatcct

SEQ ID NO: 471770 - DNA, 25 bp, Artificial
  probe
  misc_feature (1)..(25): SEQ ID NO: 7578; WAN024ER8; Start 3; Stop 27
gctaaaccaatggcaactaagaatc

SEQ ID NO: 471771 - DNA, 25 bp, Artificial
  probe
  misc_feature (1)..(25): SEQ ID NO: 7578; WAN024ER8; Start 261; Stop 285
aataactacatccgctgcatcaatc

SEQ ID NO: 471772 - DNA, 25 bp, Artificial
  probe
  misc_feature (1)..(25): SEQ ID NO: 7578; WAN024ER8; Start 226; Stop 250
cgttccataccagaaatcttaacat

SEQ ID NO: 471773 - DNA, 25 bp, Artificial
  probe
  misc_feature (1)..(25): SEQ ID NO: 7578; WAN024ER8; Start 52; Stop 76
tataggaaatggctgtcaataagtg

SEQ ID NO: 471774 - DNA, 25 bp, Artificial
  probe
  misc_feature (1)..(25): SEQ ID NO: 7578; WAN024ER8; Start 46; Stop 70
gaatcatataggaaatggctgtcaa

SEQ ID NO: 471775 - DNA, 25 bp, Artificial
  probe
  misc_feature (1)..(25): SEQ ID NO: 7578; WAN024ER8; Start 42; Stop 66
attggaatcatataggaaatggctg

SEQ ID NO: 471776 - DNA, 25 bp, Artificial
  probe
  misc_feature (1)..(25): SEQ ID NO: 7578; WAN024ER8; Start 53; Stop 77
ataggaaatggctgtcaataagtga

SEQ ID NO: 471777 - DNA, 25 bp, Artificial
  probe
  misc_feature (1)..(25): SEQ ID NO: 7578; WAN024ER8; Start 224; Stop 248
agcgttccataccagaaatcttaac

SEQ ID NO: 471778 - DNA, 25 bp, Artificial
  probe
  misc_feature (1)..(25): SEQ ID NO: 7578; WAN024ER8; Start 189; Stop 213
ttctgttggaaccttgataatcttt

SEQ ID NO: 471779 - DNA, 25 bp, Artificial
  probe
  misc_feature (1)..(25): SEQ ID NO: 7578; WAN024ER8; Start 225; Stop 249
gcgttccataccagaaatcttaaca

SEQ ID NO: 471780 - DNA, 25 bp, Artificial
  probe
  misc_feature (1)..(25): SEQ ID NO: 7578; WAN024ER8; Start 47; Stop 71
aatcatataggaaatggctgtcaat

SEQ ID NO: 471781 - DNA, 25 bp, Artificial
  probe
  misc_feature (1)..(25): SEQ ID NO: 7578; WAN024ER8; Start 221; Stop 245
caaagcgttccataccagaaatctt

SEQ ID NO: 471782 - DNA, 25 bp, Artificial
  probe
  misc_feature (1)..(25): SEQ ID NO: 7578; WAN024ER8; Start 41; Stop 65
aattggaatcatataggaaatggct

SEQ ID NO: 471783 - DNA, 25 bp, Artificial
  probe
  misc_feature (1)..(25): SEQ ID NO: 7578; WAN024ER8; Start 6; Stop 30
aaaccaatggcaactaagaatcctg

SEQ ID NO: 471784 - DNA, 25 bp, Artificial
  probe
  misc_feature (1)..(25): SEQ ID NO: 7578; WAN024ER8; Start 230; Stop 254
ccataccagaaatcttaacatcaac

SEQ ID NO: 471785 - DNA, 25 bp, Artificial
  probe
  misc_feature (1)..(25): SEQ ID NO: 7578; WAN024ER8; Start 262; Stop 286
ataactacatccgctgcatcaatct

SEQ ID NO: 471786 - DNA, 25 bp, Artificial
  probe
  misc_feature (1)..(25): SEQ ID NO: 7578; WAN024ER8; Start 234; Stop 258
accagaaatcttaacatcaactgct

SEQ ID NO: 471787 - DNA, 25 bp, Artificial
  probe
  misc_feature (1)..(25): SEQ ID NO: 7578; WAN024ER8; Start 233; Stop 257
taccagaaatcttaacatcaactgc

SEQ ID NO: 471788 - DNA, 25 bp, Artificial
  probe
  misc_feature (1)..(25): SEQ ID NO: 7578; WAN024ER8; Start 229; Stop 253
tccataccagaaatcttaacatcaa

SEQ ID NO: 471789 - DNA, 25 bp, Artificial
  probe
  misc_feature (1)..(25): SEQ ID NO: 7578; WAN024ER8; Start 235; Stop 259
ccagaaatcttaacatcaactgcta

SEQ ID NO: 471790 - DNA, 25 bp, Artificial
  probe
  misc_feature (1)..(25): SEQ ID NO: 7578; WAN024ER8; Start 51; Stop 75
atataggaaatggctgtcaataagt

SEQ ID NO: 471791 - DNA, 25 bp, Artificial
  probe
  misc_feature (1)..(25): SEQ ID NO: 7578; WAN024ER8; Start 228; Stop 252
ttccataccagaaatcttaacatca

SEQ ID NO: 471792 - DNA, 25 bp, Artificial
  probe
  misc_feature (1)..(25): SEQ ID NO: 7579; WAN024DEK; Start 119; Stop 143
ccacaacaatgattgctattcctat

SEQ ID NO: 471793 - DNA, 25 bp, Artificial
  probe
  misc_feature (1)..(25): SEQ ID NO: 7579; WAN024DEK; Start 120; Stop 144
cacaacaatgattgctattcctatt

SEQ ID NO: 471794 - DNA, 25 bp, Artificial
  probe
  misc_feature (1)..(25): SEQ ID NO: 7579; WAN024DEK; Start 150; Stop 174
aatccactccatatcaaactccttt

SEQ ID NO: 471795 - DNA, 25 bp, Artificial
  probe
  misc_feature (1)..(25): SEQ ID NO: 7579; WAN024DEK; Start 148; Stop 172
ctaatccactccatatcaaactcct

SEQ ID NO: 471796 - DNA, 25 bp, Artificial
  probe
  misc_feature (1)..(25): SEQ ID NO: 7579; WAN024DEK; Start 147; Stop 171
tctaatccactccatatcaaactcc

SEQ ID NO: 471797 - DNA, 25 bp, Artificial
  probe
  misc_feature (1)..(25): SEQ ID NO: 7579; WAN024DEK; Start 36; Stop 60
aacgagagaaacacctgaaactaaa

SEQ ID NO: 471798 - DNA, 25 bp, Artificial
  probe
  misc_feature (1)..(25): SEQ ID NO: 7579; WAN024DEK; Start 149; Stop 173
taatccactccatatcaaactcctt

SEQ ID NO: 471799 - DNA, 25 bp, Artificial
  probe
  misc_feature (1)..(25): SEQ ID NO: 7579; WAN024DEK; Start 152; Stop 176
tccactccatatcaaactcctttat

SEQ ID NO: 471800 - DNA, 25 bp, Artificial
  probe
  misc_feature (1)..(25): SEQ ID NO: 7579; WAN024DEK; Start 151; Stop 175
atccactccatatcaaactccttta

SEQ ID NO: 471801 - DNA, 25 bp, Artificial
  probe
  misc_feature (1)..(25): SEQ ID NO: 7579; WAN024DEK; Start 37; Stop 61
acgagagaaacacctgaaactaaag

SEQ ID NO: 471802 - DNA, 25 bp, Artificial
  probe
  misc_feature (1)..(25): SEQ ID NO: 7579; WAN024DEK; Start 35; Stop 59
caacgagagaaacacctgaaactaa

SEQ ID NO: 471803 - DNA, 25 bp, Artificial
  probe
  misc_feature (1)..(25): SEQ ID NO: 7579; WAN024DEK; Start 115; Stop 139
aaacccacaacaatgattgctattc

SEQ ID NO: 471804 - DNA, 25 bp, Artificial
  probe
  misc_feature (1)..(25): SEQ ID NO: 7579; WAN024DEK; Start 118; Stop 142
cccacaacaatgattgctattccta

SEQ ID NO: 471805 - DNA, 25 bp, Artificial
  probe
  misc_feature (1)..(25): SEQ ID NO: 7579; WAN024DEK; Start 38; Stop 62
cgagagaaacacctgaaactaaagc

SEQ ID NO: 471806 - DNA, 25 bp, Artificial
  probe
  misc_feature (1)..(25): SEQ ID NO: 7579; WAN024DEK; Start 146; Stop 170
atctaatccactccatatcaaactc

SEQ ID NO: 471807 - DNA, 25 bp, Artificial
  probe
  misc_feature (1)..(25): SEQ ID NO: 7579; WAN024DEK; Start 153; Stop 177
ccactccatatcaaactcctttata

SEQ ID NO: 471808 - DNA, 25 bp, Artificial
  probe
  misc_feature (1)..(25): SEQ ID NO: 7579; WAN024DEK; Start 34; Stop 58
tcaacgagagaaacacctgaaacta

SEQ ID NO: 471809 - DNA, 25 bp, Artificial
  probe
  misc_feature (1)..(25): SEQ ID NO: 7579; WAN024DEK; Start 50; Stop 74
ctgaaactaaagctgtaaccaaacc

SEQ ID NO: 471810 - DNA, 25 bp, Artificial
  probe
  misc_feature (1)..(25): SEQ ID NO: 7579; WAN024DEK; Start 49; Stop 73
cctgaaactaaagctgtaaccaaac

SEQ ID NO: 471811 - DNA, 25 bp, Artificial
  probe
  misc_feature (1)..(25): SEQ ID NO: 7579; WAN024DEK; Start 145; Stop 169
aatctaatccactccatatcaaact

SEQ ID NO: 471812 - DNA, 25 bp, Artificial
  probe
  misc_feature (1)..(25): SEQ ID NO: 7579; WAN024DEK; Start 48; Stop 72
acctgaaactaaagctgtaaccaaa

SEQ ID NO: 471813 - DNA, 25 bp, Artificial
  probe
  misc_feature (1)..(25): SEQ ID NO: 7579; WAN024DEK; Start 39; Stop 63
gagagaaacacctgaaactaaagct

SEQ ID NO: 471814 - DNA, 25 bp, Artificial
  probe
  misc_feature (1)..(25): SEQ ID NO: 7579; WAN024DEK; Start 51; Stop 75
tgaaactaaagctgtaaccaaacca

SEQ ID NO: 471815 - DNA, 25 bp, Artificial
  probe
  misc_feature (1)..(25): SEQ ID NO: 7579; WAN024DEK; Start 116; Stop 140
aacccacaacaatgattgctattcc

SEQ ID NO: 471816 - DNA, 25 bp, Artificial
  probe
  misc_feature (1)..(25): SEQ ID NO: 7579; WAN024DEK; Start 40; Stop 64
agagaaacacctgaaactaaagctg

SEQ ID NO: 471817 - DNA, 25 bp, Artificial
  probe
  misc_feature (1)..(25): SEQ ID NO: 7579; WAN024DEK; Start 121; Stop 145
acaacaatgattgctattcctatta

SEQ ID NO: 471818 - DNA, 25 bp, Artificial
  probe
  misc_feature (1)..(25): SEQ ID NO: 7579; WAN024DEK; Start 63; Stop 87
tgtaaccaaaccagctaagactact

SEQ ID NO: 471819 - DNA, 25 bp, Artificial
  probe
  misc_feature (1)..(25): SEQ ID NO: 7579; WAN024DEK; Start 47; Stop 71
cacctgaaactaaagctgtaaccaa

SEQ ID NO: 471820 - DNA, 25 bp, Artificial
  probe
  misc_feature (1)..(25): SEQ ID NO: 7579; WAN024DEK; Start 44; Stop 68
aaacacctgaaactaaagctgtaac

SEQ ID NO: 471821 - DNA, 25 bp, Artificial
  probe
  misc_feature (1)..(25): SEQ ID NO: 7579; WAN024DEK; Start 137; Stop 161
ttcctattaatctaatccactccat

SEQ ID NO: 471822 - DNA, 25 bp, Artificial
  probe
  misc_feature (1)..(25): SEQ ID NO: 7579; WAN024DEK; Start 136; Stop 160
attcctattaatctaatccactcca

SEQ ID NO: 471823 - DNA, 25 bp, Artificial
  probe
  misc_feature (1)..(25): SEQ ID NO: 7579; WAN024DEK; Start 43; Stop 67
gaaacacctgaaactaaagctgtaa

SEQ ID NO: 471824 - DNA, 25 bp, Artificial
  probe
  misc_feature (1)..(25): SEQ ID NO: 7579; WAN024DEK; Start 42; Stop 66
agaaacacctgaaactaaagctgta

SEQ ID NO: 471825 - DNA, 25 bp, Artificial
  probe
  misc_feature (1)..(25): SEQ ID NO: 7580; WAN024BOL; Start 3; Stop 27
gctaagagggctctattctagtttc

SEQ ID NO: 471826 - DNA, 25 bp, Artificial
  probe
  misc_feature (1)..(25): SEQ ID NO: 7580; WAN024BOL; Start 6; Stop 30
aagagggctctattctagtttcatg

SEQ ID NO: 471827 - DNA, 25 bp, Artificial
  probe
  misc_feature (1)..(25): SEQ ID NO: 7580; WAN024BOL; Start 2; Stop 26
tgctaagagggctctattctagttt

SEQ ID NO: 471828 - DNA, 25 bp, Artificial
  probe
  misc_feature (1)..(25): SEQ ID NO: 7580; WAN024BOL; Start 1; Stop 25
ttgctaagagggctctattctagtt

SEQ ID NO: 471829 - DNA, 25 bp, Artificial
  probe
  misc_feature (1)..(25): SEQ ID NO: 7580; WAN024BOL; Start 9; Stop 33
agggctctattctagtttcatggaa

SEQ ID NO: 471830 - DNA, 25 bp, Artificial
  probe
  misc_feature (1)..(25): SEQ ID NO: 7580; WAN024BOL; Start 4; Stop 28
ctaagagggctctattctagtttca

SEQ ID NO: 471831 - DNA, 25 bp, Artificial
  probe
  misc_feature (1)..(25): SEQ ID NO: 7580; WAN024BOL; Start 8; Stop 32
gagggctctattctagtttcatgga

SEQ ID NO: 471832 - DNA, 25 bp, Artificial
  probe
  misc_feature (1)..(25): SEQ ID NO: 7580; WAN024BOL; Start 7; Stop 31
agagggctctattctagtttcatgg

SEQ ID NO: 471833 - DNA, 25 bp, Artificial
  probe
  misc_feature (1)..(25): SEQ ID NO: 7580; WAN024BOL; Start 5; Stop 29
taagagggctctattctagtttcat

SEQ ID NO: 471834 - DNA, 25 bp, Artificial
  probe
  misc_feature (1)..(25): SEQ ID NO: 7580; WAN024BOL; Start 42; Stop 66
actaaaggttcgtatgctttgtttg

SEQ ID NO: 471835 - DNA, 25 bp, Artificial
  probe
  misc_feature (1)..(25): SEQ ID NO: 7580; WAN024BOL; Start 41; Stop 65
tactaaaggttcgtatgctttgttt

SEQ ID NO: 471836 - DNA, 25 bp, Artificial
  probe
  misc_feature (1)..(25): SEQ ID NO: 7580; WAN024BOL; Start 40; Stop 64
ttactaaaggttcgtatgctttgtt

SEQ ID NO: 471837 - DNA, 25 bp, Artificial
  probe
  misc_feature (1)..(25): SEQ ID NO: 7580; WAN024BOL; Start 39; Stop 63
tttactaaaggttcgtatgctttgt

SEQ ID NO: 471838 - DNA, 25 bp, Artificial
  probe
  misc_feature (1)..(25): SEQ ID NO: 7580; WAN024BOL; Start 10; Stop 34
gggctctattctagtttcatggaaa

SEQ ID NO: 471839 - DNA, 25 bp, Artificial
  probe
  misc_feature (1)..(25): SEQ ID NO: 7580; WAN024BOL; Start 43; Stop 67
ctaaaggttcgtatgctttgtttgc

SEQ ID NO: 471840 - DNA, 25 bp, Artificial
  probe
  misc_feature (1)..(25): SEQ ID NO: 7580; WAN024BOL; Start 11; Stop 35
ggctctattctagtttcatggaaat

SEQ ID NO: 471841 - DNA, 25 bp, Artificial
  probe
  misc_feature (1)..(25): SEQ ID NO: 7580; WAN024BOL; Start 35; Stop 59
tgattttactaaaggttcgtatgct

SEQ ID NO: 471842 - DNA, 25 bp, Artificial
  probe
  misc_feature (1)..(25): SEQ ID NO: 7580; WAN024BOL; Start 12; Stop 36
gctctattctagtttcatggaaatg

SEQ ID NO: 471843 - DNA, 25 bp, Artificial
  probe
  misc_feature (1)..(25): SEQ ID NO: 7580; WAN024BOL; Start 34; Stop 58
atgattttactaaaggttcgtatgc

SEQ ID NO: 471844 - DNA, 25 bp, Artificial
  probe
  misc_feature (1)..(25): SEQ ID NO: 7580; WAN024BOL; Start 29; Stop 53
tggaaatgattttactaaaggttcg

SEQ ID NO: 471845 - DNA, 25 bp, Artificial
  probe
  misc_feature (1)..(25): SEQ ID NO: 7580; WAN024BOL; Start 30; Stop 54
ggaaatgattttactaaaggttcgt

SEQ ID NO: 471846 - DNA, 25 bp, Artificial
  probe
  misc_feature (1)..(25): SEQ ID NO: 7580; WAN024BOL; Start 36; Stop 60
gattttactaaaggttcgtatgctt

SEQ ID NO: 471847 - DNA, 25 bp, Artificial
  probe
  misc_feature (1)..(25): SEQ ID NO: 7580; WAN024BOL; Start 44; Stop 68
taaaggttcgtatgctttgtttgca

SEQ ID NO: 471848 - DNA, 25 bp, Artificial
  probe
  misc_feature (1)..(25): SEQ ID NO: 7580; WAN024BOL; Start 38; Stop 62
ttttactaaaggttcgtatgctttg

SEQ ID NO: 471849 - DNA, 25 bp, Artificial
  probe
  misc_feature (1)..(25): SEQ ID NO: 7580; WAN024BOL; Start 13; Stop 37
ctctattctagtttcatggaaatga

SEQ ID NO: 471850 - DNA, 25 bp, Artificial
  probe
  misc_feature (1)..(25): SEQ ID NO: 7580; WAN024BOL; Start 37; Stop 61
attttactaaaggttcgtatgcttt

SEQ ID NO: 471851 - DNA, 25 bp, Artificial
  probe
  misc_feature (1)..(25): SEQ ID NO: 7580; WAN024BOL; Start 33; Stop 57
aatgattttactaaaggttcgtatg

SEQ ID NO: 471852 - DNA, 25 bp, Artificial
  probe
  misc_feature (1)..(25): SEQ ID NO: 7580; WAN024BOL; Start 28; Stop 52
atggaaatgattttactaaaggttc

SEQ ID NO: 471853 - DNA, 25 bp, Artificial
  probe
  misc_feature (1)..(25): SEQ ID NO: 7580; WAN024BOL; Start 31; Stop 55
gaaatgattttactaaaggttcgta

SEQ ID NO: 471854 - DNA, 25 bp, Artificial
  probe
  misc_feature (1)..(25): SEQ ID NO: 7580; WAN024BOL; Start 14; Stop 38
tctattctagtttcatggaaatgat

SEQ ID NO: 471855 - DNA, 25 bp, Artificial
  probe
  misc_feature (1)..(25): SEQ ID NO: 7580; WAN024BOL; Start 27; Stop 51
catggaaatgattttactaaaggtt

SEQ ID NO: 471856 - DNA, 25 bp, Artificial
  probe
  misc_feature (1)..(25): SEQ ID NO: 7580; WAN024BOL; Start 26; Stop 50
tcatggaaatgattttactaaaggt

SEQ ID NO: 471857 - DNA, 25 bp, Artificial
  probe
  misc_feature (1)..(25): SEQ ID NO: 7580; WAN024BOL; Start 15; Stop 39
ctattctagtttcatggaaatgatt

SEQ ID NO: 471858 - DNA, 25 bp, Artificial
  probe
  misc_feature (1)..(25): SEQ ID NO: 7581; WAN024FOB; Start 38; Stop 62
tttatcatactttgaaacagggaag

SEQ ID NO: 471859 - DNA, 25 bp, Artificial
  probe
  misc_feature (1)..(25): SEQ ID NO: 7581; WAN024FOB; Start 36; Stop 60
agtttatcatactttgaaacaggga

SEQ ID NO: 471860 - DNA, 25 bp, Artificial
  probe
  misc_feature (1)..(25): SEQ ID NO: 7581; WAN024FOB; Start 42; Stop 66
tcatactttgaaacagggaagttat

SEQ ID NO: 471861 - DNA, 25 bp, Artificial
  probe
  misc_feature (1)..(25): SEQ ID NO: 7581; WAN024FOB; Start 41; Stop 65
atcatactttgaaacagggaagtta

SEQ ID NO: 471862 - DNA, 25 bp, Artificial
  probe
  misc_feature (1)..(25): SEQ ID NO: 7581; WAN024FOB; Start 40; Stop 64
tatcatactttgaaacagggaagtt

SEQ ID NO: 471863 - DNA, 25 bp, Artificial
  probe
  misc_feature (1)..(25): SEQ ID NO: 7581; WAN024FOB; Start 39; Stop 63
ttatcatactttgaaacagggaagt

SEQ ID NO: 471864 - DNA, 25 bp, Artificial
  probe
  misc_feature (1)..(25): SEQ ID NO: 7581; WAN024FOB; Start 37; Stop 61
gtttatcatactttgaaacagggaa

SEQ ID NO: 471865 - DNA, 25 bp, Artificial
  probe
  misc_feature (1)..(25): SEQ ID NO: 7581; WAN024FOB; Start 35; Stop 59
tagtttatcatactttgaaacaggg

SEQ ID NO: 471866 - DNA, 25 bp, Artificial
  probe
  misc_feature (1)..(25): SEQ ID NO: 7581; WAN024FOB; Start 43; Stop 67
catactttgaaacagggaagttata

SEQ ID NO: 471867 - DNA, 25 bp, Artificial
  probe
  misc_feature (1)..(25): SEQ ID NO: 7581; WAN024FOB; Start 20; Stop 44
actttgtctacctactagtttatca

SEQ ID NO: 471868 - DNA, 25 bp, Artificial
  probe
  misc_feature (1)..(25): SEQ ID NO: 7581; WAN024FOB; Start 34; Stop 58
ctagtttatcatactttgaaacagg

SEQ ID NO: 471869 - DNA, 25 bp, Artificial
  probe
  misc_feature (1)..(25): SEQ ID NO: 7581; WAN024FOB; Start 47; Stop 71
ctttgaaacagggaagttatatatt

SEQ ID NO: 471870 - DNA, 25 bp, Artificial
  probe
  misc_feature (1)..(25): SEQ ID NO: 7581; WAN024FOB; Start 16; Stop 40
acagactttgtctacctactagttt

SEQ ID NO: 471871 - DNA, 25 bp, Artificial
  probe
  misc_feature (1)..(25): SEQ ID NO: 7581; WAN024FOB; Start 44; Stop 68
atactttgaaacagggaagttatat

SEQ ID NO: 471872 - DNA, 25 bp, Artificial
  probe
  misc_feature (1)..(25): SEQ ID NO: 7581; WAN024FOB; Start 46; Stop 70
actttgaaacagggaagttatatat

SEQ ID NO: 471873 - DNA, 25 bp, Artificial
  probe
  misc_feature (1)..(25): SEQ ID NO: 7581; WAN024FOB; Start 19; Stop 43
gactttgtctacctactagtttatc

SEQ ID NO: 471874 - DNA, 25 bp, Artificial
  probe
  misc_feature (1)..(25): SEQ ID NO: 7581; WAN024FOB; Start 15; Stop 39
tacagactttgtctacctactagtt

SEQ ID NO: 471875 - DNA, 25 bp, Artificial
  probe
  misc_feature (1)..(25): SEQ ID NO: 7581; WAN024FOB; Start 14; Stop 38
atacagactttgtctacctactagt

SEQ ID NO: 471876 - DNA, 25 bp, Artificial
  probe
  misc_feature (1)..(25): SEQ ID NO: 7581; WAN024FOB; Start 21; Stop 45
ctttgtctacctactagtttatcat

SEQ ID NO: 471877 - DNA, 25 bp, Artificial
  probe
  misc_feature (1)..(25): SEQ ID NO: 7581; WAN024FOB; Start 24; Stop 48
tgtctacctactagtttatcatact

SEQ ID NO: 471878 - DNA, 25 bp, Artificial
  probe
  misc_feature (1)..(25): SEQ ID NO: 7581; WAN024FOB; Start 45; Stop 69
tactttgaaacagggaagttatata

SEQ ID NO: 471879 - DNA, 25 bp, Artificial
  probe
  misc_feature (1)..(25): SEQ ID NO: 7581; WAN024FOB; Start 17; Stop 41
cagactttgtctacctactagttta

SEQ ID NO: 471880 - DNA, 25 bp, Artificial
  probe
  misc_feature (1)..(25): SEQ ID NO: 7581; WAN024FOB; Start 23; Stop 47
ttgtctacctactagtttatcatac

SEQ ID NO: 471881 - DNA, 25 bp, Artificial
  probe
  misc_feature (1)..(25): SEQ ID NO: 7581; WAN024FOB; Start 29; Stop 53
acctactagtttatcatactttgaa

SEQ ID NO: 471882 - DNA, 25 bp, Artificial
  probe
  misc_feature (1)..(25): SEQ ID NO: 7581; WAN024FOB; Start 18; Stop 42
agactttgtctacctactagtttat

SEQ ID NO: 471883 - DNA, 25 bp, Artificial
  probe
  misc_feature (1)..(25): SEQ ID NO: 7581; WAN024FOB; Start 33; Stop 57
actagtttatcatactttgaaacag

SEQ ID NO: 471884 - DNA, 25 bp, Artificial
  probe
  misc_feature (1)..(25): SEQ ID NO: 7582; WAN024BB3; Start 43; Stop 67
cttgccgtatgtatggttactgact

SEQ ID NO: 471885 - DNA, 25 bp, Artificial
  probe
  misc_feature (1)..(25): SEQ ID NO: 7582; WAN024BB3; Start 47; Stop 71
ccgtatgtatggttactgactttgt

SEQ ID NO: 471886 - DNA, 25 bp, Artificial
  probe
  misc_feature (1)..(25): SEQ ID NO: 7582; WAN024BB3; Start 42; Stop 66
ccttgccgtatgtatggttactgac

SEQ ID NO: 471887 - DNA, 25 bp, Artificial
  probe
  misc_feature (1)..(25): SEQ ID NO: 7582; WAN024BB3; Start 46; Stop 70
gccgtatgtatggttactgactttg

SEQ ID NO: 471888 - DNA, 25 bp, Artificial
  probe
  misc_feature (1)..(25): SEQ ID NO: 7582; WAN024BB3; Start 69; Stop 93
tgtcagtttcatctacaacctcaaa

SEQ ID NO: 471889 - DNA, 25 bp, Artificial
  probe
  misc_feature (1)..(25): SEQ ID NO: 7582; WAN024BB3; Start 45; Stop 69
tgccgtatgtatggttactgacttt

SEQ ID NO: 471890 - DNA, 25 bp, Artificial
  probe
  misc_feature (1)..(25): SEQ ID NO: 7582; WAN024BB3; Start 48; Stop 72
cgtatgtatggttactgactttgtc

SEQ ID NO: 471891 - DNA, 25 bp, Artificial
  probe
  misc_feature (1)..(25): SEQ ID NO: 7582; WAN024BB3; Start 41; Stop 65
gccttgccgtatgtatggttactga

SEQ ID NO: 471892 - DNA, 25 bp, Artificial
  probe
  misc_feature (1)..(25): SEQ ID NO: 7582; WAN024BB3; Start 68; Stop 92
ttgtcagtttcatctacaacctcaa

SEQ ID NO: 471893 - DNA, 25 bp, Artificial
  probe
  misc_feature (1)..(25): SEQ ID NO: 7582; WAN024BB3; Start 67; Stop 91
tttgtcagtttcatctacaacctca

SEQ ID NO: 471894 - DNA, 25 bp, Artificial
  probe
  misc_feature (1)..(25): SEQ ID NO: 7582; WAN024BB3; Start 66; Stop 90
ctttgtcagtttcatctacaacctc

SEQ ID NO: 471895 - DNA, 25 bp, Artificial
  probe
  misc_feature (1)..(25): SEQ ID NO: 7582; WAN024BB3; Start 65; Stop 89
actttgtcagtttcatctacaacct

SEQ ID NO: 471896 - DNA, 25 bp, Artificial
  probe
  misc_feature (1)..(25): SEQ ID NO: 7582; WAN024BB3; Start 64; Stop 88
gactttgtcagtttcatctacaacc

SEQ ID NO: 471897 - DNA, 25 bp, Artificial
  probe
  misc_feature (1)..(25): SEQ ID NO: 7582; WAN024BB3; Start 63; Stop 87
tgactttgtcagtttcatctacaac

SEQ ID NO: 471898 - DNA, 25 bp, Artificial
  probe
  misc_feature (1)..(25): SEQ ID NO: 7582; WAN024BB3; Start 49; Stop 73
gtatgtatggttactgactttgtca

SEQ ID NO: 471899 - DNA, 25 bp, Artificial
  probe
  misc_feature (1)..(25): SEQ ID NO: 7582; WAN024BB3; Start 2; Stop 26
tgctactcttcgaaaatctcttcaa

SEQ ID NO: 471900 - DNA, 25 bp, Artificial
  probe
  misc_feature (1)..(25): SEQ ID NO: 7582; WAN024BB3; Start 1; Stop 25
ttgctactcttcgaaaatctcttca

SEQ ID NO: 471901 - DNA, 25 bp, Artificial
  probe
  misc_feature (1)..(25): SEQ ID NO: 7582; WAN024BB3; Start 3; Stop 27
gctactcttcgaaaatctcttcaaa

SEQ ID NO: 471902 - DNA, 25 bp, Artificial
  probe
  misc_feature (1)..(25): SEQ ID NO: 7582; WAN024BB3; Start 4; Stop 28
ctactcttcgaaaatctcttcaaac

SEQ ID NO: 471903 - DNA, 25 bp, Artificial
  probe
  misc_feature (1)..(25): SEQ ID NO: 7583; WAN024DBE; Start 389; Stop 413
ttattggtgcgatattaagtggatt

SEQ ID NO: 471904 - DNA, 25 bp, Artificial
  probe
  misc_feature (1)..(25): SEQ ID NO: 7583; WAN024DBE; Start 765; Stop 789
cacgctattgaagaggtatgataga

SEQ ID NO: 471905 - DNA, 25 bp, Artificial
  probe
  misc_feature (1)..(25): SEQ ID NO: 7583; WAN024DBE; Start 766; Stop 790
acgctattgaagaggtatgatagaa

SEQ ID NO: 471906 - DNA, 25 bp, Artificial
  probe
  misc_feature (1)..(25): SEQ ID NO: 7583; WAN024DBE; Start 764; Stop 788
gcacgctattgaagaggtatgatag

SEQ ID NO: 471907 - DNA, 25 bp, Artificial
  probe
  misc_feature (1)..(25): SEQ ID NO: 7583; WAN024DBE; Start 767; Stop 791
cgctattgaagaggtatgatagaag

SEQ ID NO: 471908 - DNA, 25 bp, Artificial
  probe
  misc_feature (1)..(25): SEQ ID NO: 7583; WAN024DBE; Start 762; Stop 786
tagcacgctattgaagaggtatgat

SEQ ID NO: 471909 - DNA, 25 bp, Artificial
  probe
  misc_feature (1)..(25): SEQ ID NO: 7583; WAN024DBE; Start 171; Stop 195
agagaatatgacgataagaggaatc

SEQ ID NO: 471910 - DNA, 25 bp, Artificial
  probe
  misc_feature (1)..(25): SEQ ID NO: 7583; WAN024DBE; Start 65; Stop 89
agttacttggaatacatggtgtgtt

SEQ ID NO: 471911 - DNA, 25 bp, Artificial
  probe
  misc_feature (1)..(25): SEQ ID NO: 7583; WAN024DBE; Start 64; Stop 88
aagttacttggaatacatggtgtgt

SEQ ID NO: 471912 - DNA, 25 bp, Artificial
  probe
  misc_feature (1)..(25): SEQ ID NO: 7583; WAN024DBE; Start 761; Stop 785
ttagcacgctattgaagaggtatga

SEQ ID NO: 471913 - DNA, 25 bp, Artificial
  probe
  misc_feature (1)..(25): SEQ ID NO: 7583; WAN024DBE; Start 490; Stop 514
ccgatctattatatgttccgcaacg

SEQ ID NO: 471914 - DNA, 25 bp, Artificial
  probe
  misc_feature (1)..(25): SEQ ID NO: 7583; WAN024DBE; Start 78; Stop 102
acatggtgtgttattactagatgga

SEQ ID NO: 471915 - DNA, 25 bp, Artificial
  probe
  misc_feature (1)..(25): SEQ ID NO: 7583; WAN024DBE; Start 172; Stop 196
gagaatatgacgataagaggaatct

SEQ ID NO: 471916 - DNA, 25 bp, Artificial
  probe
  misc_feature (1)..(25): SEQ ID NO: 7583; WAN024DBE; Start 66; Stop 90
gttacttggaatacatggtgtgtta

SEQ ID NO: 471917 - DNA, 25 bp, Artificial
  probe
  misc_feature (1)..(25): SEQ ID NO: 7583; WAN024DBE; Start 79; Stop 103
catggtgtgttattactagatggat

SEQ ID NO: 471918 - DNA, 25 bp, Artificial
  probe
  misc_feature (1)..(25): SEQ ID NO: 7583; WAN024DBE; Start 489; Stop 513
gccgatctattatatgttccgcaac

SEQ ID NO: 471919 - DNA, 25 bp, Artificial
  probe
  misc_feature (1)..(25): SEQ ID NO: 7583; WAN024DBE; Start 63; Stop 87
taagttacttggaatacatggtgtg

SEQ ID NO: 471920 - DNA, 25 bp, Artificial
  probe
  misc_feature (1)..(25): SEQ ID NO: 7583; WAN024DBE; Start 80; Stop 104
atggtgtgttattactagatggatt

SEQ ID NO: 471921 - DNA, 25 bp, Artificial
  probe
  misc_feature (1)..(25): SEQ ID NO: 7583; WAN024DBE; Start 333; Stop 357
aagtatttcaagtgggctatatgga

SEQ ID NO: 471922 - DNA, 25 bp, Artificial
  probe
  misc_feature (1)..(25): SEQ ID NO: 7583; WAN024DBE; Start 170; Stop 194
aagagaatatgacgataagaggaat

SEQ ID NO: 471923 - DNA, 25 bp, Artificial
  probe
  misc_feature (1)..(25): SEQ ID NO: 7583; WAN024DBE; Start 492; Stop 516
gatctattatatgttccgcaacgtc

SEQ ID NO: 471924 - DNA, 25 bp, Artificial
  probe
  misc_feature (1)..(25): SEQ ID NO: 7583; WAN024DBE; Start 494; Stop 518
tctattatatgttccgcaacgtcat

SEQ ID NO: 471925 - DNA, 25 bp, Artificial
  probe
  misc_feature (1)..(25): SEQ ID NO: 7583; WAN024DBE; Start 493; Stop 517
atctattatatgttccgcaacgtca

SEQ ID NO: 471926 - DNA, 25 bp, Artificial
  probe
  misc_feature (1)..(25): SEQ ID NO: 7583; WAN024DBE; Start 768; Stop 792
gctattgaagaggtatgatagaagt

SEQ ID NO: 471927 - DNA, 25 bp, Artificial
  probe
  misc_feature (1)..(25): SEQ ID NO: 7583; WAN024DBE; Start 495; Stop 519
ctattatatgttccgcaacgtcatt

SEQ ID NO: 471928 - DNA, 25 bp, Artificial
  probe
  misc_feature (1)..(25): SEQ ID NO: 7583; WAN024DBE; Start 336; Stop 360
tatttcaagtgggctatatggaacc

SEQ ID NO: 471929 - DNA, 25 bp, Artificial
  probe
  misc_feature (1)..(25): SEQ ID NO: 7583; WAN024DBE; Start 626; Stop 650
tatttggaatcatctttacggtagc

SEQ ID NO: 471930 - DNA, 25 bp, Artificial
  probe
  misc_feature (1)..(25): SEQ ID NO: 7583; WAN024DBE; Start 335; Stop 359
gtatttcaagtgggctatatggaac

SEQ ID NO: 471931 - DNA, 25 bp, Artificial
  probe
  misc_feature (1)..(25): SEQ ID NO: 7583; WAN024DBE; Start 334; Stop 358
agtatttcaagtgggctatatggaa

SEQ ID NO: 471932 - DNA, 25 bp, Artificial
  probe
  misc_feature (1)..(25): SEQ ID NO: 7583; WAN024DBE; Start 330; Stop 354
tggaagtatttcaagtgggctatat

SEQ ID NO: 471933 - DNA, 25 bp, Artificial
  probe
  misc_feature (1)..(25): SEQ ID NO: 7583; WAN024DBE; Start 607; Stop 631
aatgagtttcttggcagagtatttg

SEQ ID NO: 471934 - DNA, 25 bp, Artificial
  probe
  misc_feature (1)..(25): SEQ ID NO: 7583; WAN024DBE; Start 623; Stop 647
gagtatttggaatcatctttacggt

SEQ ID NO: 471935 - DNA, 25 bp, Artificial
  probe
  misc_feature (1)..(25): SEQ ID NO: 7583; WAN024DBE; Start 332; Stop 356
gaagtatttcaagtgggctatatgg

SEQ ID NO: 471936 - DNA, 25 bp, Artificial
  probe
  misc_feature (1)..(25): SEQ ID NO: 7584; WAN024BTM; Start 35; Stop 59
attatctaggaaatggagtagtaca

SEQ ID NO: 471937 - DNA, 25 bp, Artificial
  probe
  misc_feature (1)..(25): SEQ ID NO: 7584; WAN024BTM; Start 36; Stop 60
ttatctaggaaatggagtagtacat

SEQ ID NO: 471938 - DNA, 25 bp, Artificial
  probe
  misc_feature (1)..(25): SEQ ID NO: 7584; WAN024BTM; Start 32; Stop 56
agtattatctaggaaatggagtagt

SEQ ID NO: 471939 - DNA, 25 bp, Artificial
  probe
  misc_feature (1)..(25): SEQ ID NO: 7584; WAN024BTM; Start 37; Stop 61
tatctaggaaatggagtagtacatt

SEQ ID NO: 471940 - DNA, 25 bp, Artificial
  probe
  misc_feature (1)..(25): SEQ ID NO: 7584; WAN024BTM; Start 31; Stop 55
aagtattatctaggaaatggagtag

SEQ ID NO: 471941 - DNA, 25 bp, Artificial
  probe
  misc_feature (1)..(25): SEQ ID NO: 7584; WAN024BTM; Start 29; Stop 53
ctaagtattatctaggaaatggagt

SEQ ID NO: 471942 - DNA, 25 bp, Artificial
  probe
  misc_feature (1)..(25): SEQ ID NO: 7584; WAN024BTM; Start 28; Stop 52
actaagtattatctaggaaatggag

SEQ ID NO: 471943 - DNA, 25 bp, Artificial
  probe
  misc_feature (1)..(25): SEQ ID NO: 7584; WAN024BTM; Start 38; Stop 62
atctaggaaatggagtagtacattt

SEQ ID NO: 471944 - DNA, 25 bp, Artificial
  probe
  misc_feature (1)..(25): SEQ ID NO: 7584; WAN024BTM; Start 39; Stop 63
tctaggaaatggagtagtacattta

SEQ ID NO: 471945 - DNA, 25 bp, Artificial
  probe
  misc_feature (1)..(25): SEQ ID NO: 7584; WAN024BTM; Start 40; Stop 64
ctaggaaatggagtagtacatttat

SEQ ID NO: 471946 - DNA, 25 bp, Artificial
  probe
  misc_feature (1)..(25): SEQ ID NO: 7584; WAN024BTM; Start 42; Stop 66
aggaaatggagtagtacatttatat

SEQ ID NO: 471947 - DNA, 25 bp, Artificial
  probe
  misc_feature (1)..(25): SEQ ID NO: 7585; WAN024GHZ; Start 523; Stop 547
gaagtattcggtgaaccacaattac

SEQ ID NO: 471948 - DNA, 25 bp, Artificial
  probe
  misc_feature (1)..(25): SEQ ID NO: 7585; WAN024GHZ; Start 522; Stop 546
agaagtattcggtgaaccacaatta

SEQ ID NO: 471949 - DNA, 25 bp, Artificial
  probe
  misc_feature (1)..(25): SEQ ID NO: 7585; WAN024GHZ; Start 527; Stop 551
tattcggtgaaccacaattactaga

SEQ ID NO: 471950 - DNA, 25 bp, Artificial
  probe
  misc_feature (1)..(25): SEQ ID NO: 7585; WAN024GHZ; Start 526; Stop 550
gtattcggtgaaccacaattactag

SEQ ID NO: 471951 - DNA, 25 bp, Artificial
  probe
  misc_feature (1)..(25): SEQ ID NO: 7585; WAN024GHZ; Start 528; Stop 552
attcggtgaaccacaattactagag

SEQ ID NO: 471952 - DNA, 25 bp, Artificial
  probe
  misc_feature (1)..(25): SEQ ID NO: 7585; WAN024GHZ; Start 521; Stop 545
aagaagtattcggtgaaccacaatt

SEQ ID NO: 471953 - DNA, 25 bp, Artificial
  probe
  misc_feature (1)..(25): SEQ ID NO: 7585; WAN024GHZ; Start 525; Stop 549
agtattcggtgaaccacaattacta

SEQ ID NO: 471954 - DNA, 25 bp, Artificial
  probe
  misc_feature (1)..(25): SEQ ID NO: 7585; WAN024GHZ; Start 524; Stop 548
aagtattcggtgaaccacaattact

SEQ ID NO: 471955 - DNA, 25 bp, Artificial
  probe
  misc_feature (1)..(25): SEQ ID NO: 7585; WAN024GHZ; Start 530; Stop 554
tcggtgaaccacaattactagagtt

SEQ ID NO: 471956 - DNA, 25 bp, Artificial
  probe
  misc_feature (1)..(25): SEQ ID NO: 7585; WAN024GHZ; Start 529; Stop 553
ttcggtgaaccacaattactagagt

SEQ ID NO: 471957 - DNA, 25 bp, Artificial
  probe
  misc_feature (1)..(25): SEQ ID NO: 7585; WAN024GHZ; Start 610; Stop 634
tacggtgattacatgaagttaccaa

SEQ ID NO: 471958 - DNA, 25 bp, Artificial
  probe
  misc_feature (1)..(25): SEQ ID NO: 7585; WAN024GHZ; Start 609; Stop 633
atacggtgattacatgaagttacca

SEQ ID NO: 471959 - DNA, 25 bp, Artificial
  probe
  misc_feature (1)..(25): SEQ ID NO: 7585; WAN024GHZ; Start 96; Stop 120
ttgtaacaaggaacttccagaacat

SEQ ID NO: 471960 - DNA, 25 bp, Artificial
  probe
  misc_feature (1)..(25): SEQ ID NO: 7585; WAN024GHZ; Start 36; Stop 60
ttgggatgatgatatggatttagga

SEQ ID NO: 471961 - DNA, 25 bp, Artificial
  probe
  misc_feature (1)..(25): SEQ ID NO: 7585; WAN024GHZ; Start 41; Stop 65
atgatgatatggatttaggaatgcc

SEQ ID NO: 471962 - DNA, 25 bp, Artificial
  probe
  misc_feature (1)..(25): SEQ ID NO: 7585; WAN024GHZ; Start 35; Stop 59
cttgggatgatgatatggatttagg

SEQ ID NO: 471963 - DNA, 25 bp, Artificial
  probe
  misc_feature (1)..(25): SEQ ID NO: 7585; WAN024GHZ; Start 34; Stop 58
ccttgggatgatgatatggatttag

SEQ ID NO: 471964 - DNA, 25 bp, Artificial
  probe
  misc_feature (1)..(25): SEQ ID NO: 7585; WAN024GHZ; Start 3; Stop 27
gctaggagtaattcgtcataaagga

SEQ ID NO: 471965 - DNA, 25 bp, Artificial
  probe
  misc_feature (1)..(25): SEQ ID NO: 7585; WAN024GHZ; Start 2; Stop 26
tgctaggagtaattcgtcataaagg

SEQ ID NO: 471966 - DNA, 25 bp, Artificial
  probe
  misc_feature (1)..(25): SEQ ID NO: 7585; WAN024GHZ; Start 495; Stop 519
atacagagaacgtgaacttgctaga

SEQ ID NO: 471967 - DNA, 25 bp, Artificial
  probe
  misc_feature (1)..(25): SEQ ID NO: 7585; WAN024GHZ; Start 494; Stop 518
catacagagaacgtgaacttgctag

SEQ ID NO: 471968 - DNA, 25 bp, Artificial
  probe
  misc_feature (1)..(25): SEQ ID NO: 7585; WAN024GHZ; Start 97; Stop 121
tgtaacaaggaacttccagaacatg

SEQ ID NO: 471969 - DNA, 25 bp, Artificial
  probe
  misc_feature (1)..(25): SEQ ID NO: 7585; WAN024GHZ; Start 496; Stop 520
tacagagaacgtgaacttgctagaa

SEQ ID NO: 471970 - DNA, 25 bp, Artificial
  probe
  misc_feature (1)..(25): SEQ ID NO: 7585; WAN024GHZ; Start 479; Stop 503
ggaatgtactaggttcatacagaga

SEQ ID NO: 471971 - DNA, 25 bp, Artificial
  probe
  misc_feature (1)..(25): SEQ ID NO: 7585; WAN024GHZ; Start 1; Stop 25
ttgctaggagtaattcgtcataaag

SEQ ID NO: 471972 - DNA, 25 bp, Artificial
  probe
  misc_feature (1)..(25): SEQ ID NO: 7585; WAN024GHZ; Start 187; Stop 211
ccatttggagatgaactatgtagtc

SEQ ID NO: 471973 - DNA, 25 bp, Artificial
  probe
  misc_feature (1)..(25): SEQ ID NO: 7585; WAN024GHZ; Start 608; Stop 632
tatacggtgattacatgaagttacc

SEQ ID NO: 471974 - DNA, 25 bp, Artificial
  probe
  misc_feature (1)..(25): SEQ ID NO: 7585; WAN024GHZ; Start 410; Stop 434
cagccactattaacaacaaattaca

SEQ ID NO: 471975 - DNA, 25 bp, Artificial
  probe
  misc_feature (1)..(25): SEQ ID NO: 7585; WAN024GHZ; Start 409; Stop 433
acagccactattaacaacaaattac

SEQ ID NO: 471976 - DNA, 25 bp, Artificial
  probe
  misc_feature (1)..(25): SEQ ID NO: 7585; WAN024GHZ; Start 407; Stop 431
aaacagccactattaacaacaaatt

SEQ ID NO: 471977 - DNA, 25 bp, Artificial
  probe
  misc_feature (1)..(25): SEQ ID NO: 7585; WAN024GHZ; Start 493; Stop 517
tcatacagagaacgtgaacttgcta

SEQ ID NO: 471978 - DNA, 25 bp, Artificial
  probe
  misc_feature (1)..(25): SEQ ID NO: 7585; WAN024GHZ; Start 537; Stop 561
accacaattactagagtttgagaac

SEQ ID NO: 471979 - DNA, 25 bp, Artificial
  probe
  misc_feature (1)..(25): SEQ ID NO: 7585; WAN024GHZ; Start 534; Stop 558
tgaaccacaattactagagtttgag

SEQ ID NO: 471980 - DNA, 25 bp, Artificial
  probe
  misc_feature (1)..(25): SEQ ID NO: 7586; WAN024F6Q; Start 13; Stop 37
ggcttgtctgtaggtgttaatactt

SEQ ID NO: 471981 - DNA, 25 bp, Artificial
  probe
  misc_feature (1)..(25): SEQ ID NO: 7586; WAN024F6Q; Start 12; Stop 36
aggcttgtctgtaggtgttaatact

SEQ ID NO: 471982 - DNA, 25 bp, Artificial
  probe
  misc_feature (1)..(25): SEQ ID NO: 7586; WAN024F6Q; Start 11; Stop 35
caggcttgtctgtaggtgttaatac

SEQ ID NO: 471983 - DNA, 25 bp, Artificial
  probe
  misc_feature (1)..(25): SEQ ID NO: 7586; WAN024F6Q; Start 10; Stop 34
tcaggcttgtctgtaggtgttaata

SEQ ID NO: 471984 - DNA, 25 bp, Artificial
  probe
  misc_feature (1)..(25): SEQ ID NO: 7586; WAN024F6Q; Start 14; Stop 38
gcttgtctgtaggtgttaatacttt

SEQ ID NO: 471985 - DNA, 25 bp, Artificial
  probe
  misc_feature (1)..(25): SEQ ID NO: 7586; WAN024F6Q; Start 9; Stop 33
gtcaggcttgtctgtaggtgttaat

SEQ ID NO: 471986 - DNA, 25 bp, Artificial
  probe
  misc_feature (1)..(25): SEQ ID NO: 7586; WAN024F6Q; Start 1; Stop 25
ttgctatcgtcaggcttgtctgtag

SEQ ID NO: 471987 - DNA, 25 bp, Artificial
  probe
  misc_feature (1)..(25): SEQ ID NO: 7586; WAN024F6Q; Start 8; Stop 32
cgtcaggcttgtctgtaggtgttaa

SEQ ID NO: 471988 - DNA, 25 bp, Artificial
  probe
  misc_feature (1)..(25): SEQ ID NO: 7586; WAN024F6Q; Start 4; Stop 28
ctatcgtcaggcttgtctgtaggtg

SEQ ID NO: 471989 - DNA, 25 bp, Artificial
  probe
  misc_feature (1)..(25): SEQ ID NO: 7586; WAN024F6Q; Start 17; Stop 41
tgtctgtaggtgttaatacttttca

SEQ ID NO: 471990 - DNA, 25 bp, Artificial
  probe
  misc_feature (1)..(25): SEQ ID NO: 7586; WAN024F6Q; Start 18; Stop 42
gtctgtaggtgttaatacttttcaa

SEQ ID NO: 471991 - DNA, 25 bp, Artificial
  probe
  misc_feature (1)..(25): SEQ ID NO: 7586; WAN024F6Q; Start 16; Stop 40
ttgtctgtaggtgttaatacttttc

SEQ ID NO: 471992 - DNA, 25 bp, Artificial
  probe
  misc_feature (1)..(25): SEQ ID NO: 7586; WAN024F6Q; Start 15; Stop 39
cttgtctgtaggtgttaatactttt

SEQ ID NO: 471993 - DNA, 25 bp, Artificial
  probe
  misc_feature (1)..(25): SEQ ID NO: 7586; WAN024F6Q; Start 5; Stop 29
tatcgtcaggcttgtctgtaggtgt

SEQ ID NO: 471994 - DNA, 25 bp, Artificial
  probe
  misc_feature (1)..(25): SEQ ID NO: 7586; WAN024F6Q; Start 19; Stop 43
tctgtaggtgttaatacttttcaaa

SEQ ID NO: 471995 - DNA, 25 bp, Artificial
  probe
  misc_feature (1)..(25): SEQ ID NO: 7586; WAN024F6Q; Start 20; Stop 44
ctgtaggtgttaatacttttcaaaa

SEQ ID NO: 471996 - DNA, 25 bp, Artificial
  probe
  misc_feature (1)..(25): SEQ ID NO: 7587; WAN024C3G; Start 70; Stop 94
attgtaggtggagttaatagcaacg

SEQ ID NO: 471997 - DNA, 25 bp, Artificial
  probe
  misc_feature (1)..(25): SEQ ID NO: 7587; WAN024C3G; Start 69; Stop 93
tattgtaggtggagttaatagcaac

SEQ ID NO: 471998 - DNA, 25 bp, Artificial
  probe
  misc_feature (1)..(25): SEQ ID NO: 7587; WAN024C3G; Start 68; Stop 92
ttattgtaggtggagttaatagcaa

SEQ ID NO: 471999 - DNA, 25 bp, Artificial
  probe
  misc_feature (1)..(25): SEQ ID NO: 7587; WAN024C3G; Start 67; Stop 91
attattgtaggtggagttaatagca

SEQ ID NO: 472000 - DNA, 25 bp, Artificial
  probe
  misc_feature (1)..(25): SEQ ID NO: 7587; WAN024C3G; Start 71; Stop 95
ttgtaggtggagttaatagcaacgg

SEQ ID NO: 472001 - DNA, 25 bp, Artificial
  probe
  misc_feature (1)..(25): SEQ ID NO: 7587; WAN024C3G; Start 74; Stop 98
taggtggagttaatagcaacggaga

SEQ ID NO: 472002 - DNA, 25 bp, Artificial
  probe
  misc_feature (1)..(25): SEQ ID NO: 7587; WAN024C3G; Start 73; Stop 97
gtaggtggagttaatagcaacggag

SEQ ID NO: 472003 - DNA, 25 bp, Artificial
  probe
  misc_feature (1)..(25): SEQ ID NO: 7587; WAN024C3G; Start 78; Stop 102
tggagttaatagcaacggagaaatt

SEQ ID NO: 472004 - DNA, 25 bp, Artificial
  probe
  misc_feature (1)..(25): SEQ ID NO: 7587; WAN024C3G; Start 79; Stop 103
ggagttaatagcaacggagaaattg

SEQ ID NO: 472005 - DNA, 25 bp, Artificial
  probe
  misc_feature (1)..(25): SEQ ID NO: 7587; WAN024C3G; Start 80; Stop 104
gagttaatagcaacggagaaattga

SEQ ID NO: 472006 - DNA, 25 bp, Artificial
  probe
  misc_feature (1)..(25): SEQ ID NO: 7587; WAN024C3G; Start 77; Stop 101
gtggagttaatagcaacggagaaat

SEQ ID NO: 472007 - DNA, 25 bp, Artificial
  probe
  misc_feature (1)..(25): SEQ ID NO: 7587; WAN024C3G; Start 239; Stop 263
aattgtattctcaagggaacagaca

SEQ ID NO: 472008 - DNA, 25 bp, Artificial
  probe
  misc_feature (1)..(25): SEQ ID NO: 7587; WAN024C3G; Start 243; Stop 267
gtattctcaagggaacagacaacac

SEQ ID NO: 472009 - DNA, 25 bp, Artificial
  probe
  misc_feature (1)..(25): SEQ ID NO: 7587; WAN024C3G; Start 81; Stop 105
agttaatagcaacggagaaattgat

SEQ ID NO: 472010 - DNA, 25 bp, Artificial
  probe
  misc_feature (1)..(25): SEQ ID NO: 7587; WAN024C3G; Start 72; Stop 96
tgtaggtggagttaatagcaacgga

SEQ ID NO: 472011 - DNA, 25 bp, Artificial
  probe
  misc_feature (1)..(25): SEQ ID NO: 7587; WAN024C3G; Start 238; Stop 262
aaattgtattctcaagggaacagac

SEQ ID NO: 472012 - DNA, 25 bp, Artificial
  probe
  misc_feature (1)..(25): SEQ ID NO: 7587; WAN024C3G; Start 244; Stop 268
tattctcaagggaacagacaacaca

SEQ ID NO: 472013 - DNA, 25 bp, Artificial
  probe
  misc_feature (1)..(25): SEQ ID NO: 7587; WAN024C3G; Start 66; Stop 90
aattattgtaggtggagttaatagc

SEQ ID NO: 472014 - DNA, 25 bp, Artificial
  probe
  misc_feature (1)..(25): SEQ ID NO: 7587; WAN024C3G; Start 75; Stop 99
aggtggagttaatagcaacggagaa

SEQ ID NO: 472015 - DNA, 25 bp, Artificial
  probe
  misc_feature (1)..(25): SEQ ID NO: 7587; WAN024C3G; Start 195; Stop 219
agaaacagataaattgtgtcctcaa

SEQ ID NO: 472016 - DNA, 25 bp, Artificial
  probe
  misc_feature (1)..(25): SEQ ID NO: 7587; WAN024C3G; Start 82; Stop 106
gttaatagcaacggagaaattgatc

SEQ ID NO: 472017 - DNA, 25 bp, Artificial
  probe
  misc_feature (1)..(25): SEQ ID NO: 7587; WAN024C3G; Start 101; Stop 125
ttgatcctgcaatgttaaccataat

SEQ ID NO: 472018 - DNA, 25 bp, Artificial
  probe
  misc_feature (1)..(25): SEQ ID NO: 7587; WAN024C3G; Start 242; Stop 266
tgtattctcaagggaacagacaaca

SEQ ID NO: 472019 - DNA, 25 bp, Artificial
  probe
  misc_feature (1)..(25): SEQ ID NO: 7587; WAN024C3G; Start 84; Stop 108
taatagcaacggagaaattgatcct

SEQ ID NO: 472020 - DNA, 25 bp, Artificial
  probe
  misc_feature (1)..(25): SEQ ID NO: 7587; WAN024C3G; Start 102; Stop 126
tgatcctgcaatgttaaccataata

SEQ ID NO: 472021 - DNA, 25 bp, Artificial
  probe
  misc_feature (1)..(25): SEQ ID NO: 7587; WAN024C3G; Start 83; Stop 107
ttaatagcaacggagaaattgatcc

SEQ ID NO: 472022 - DNA, 25 bp, Artificial
  probe
  misc_feature (1)..(25): SEQ ID NO: 7587; WAN024C3G; Start 196; Stop 220
gaaacagataaattgtgtcctcaaa

SEQ ID NO: 472023 - DNA, 25 bp, Artificial
  probe
  misc_feature (1)..(25): SEQ ID NO: 7587; WAN024C3G; Start 194; Stop 218
tagaaacagataaattgtgtcctca

SEQ ID NO: 472024 - DNA, 25 bp, Artificial
  probe
  misc_feature (1)..(25): SEQ ID NO: 7587; WAN024C3G; Start 192; Stop 216
actagaaacagataaattgtgtcct

SEQ ID NO: 472025 - DNA, 25 bp, Artificial
  probe
  misc_feature (1)..(25): SEQ ID NO: 7587; WAN024C3G; Start 85; Stop 109
aatagcaacggagaaattgatcctg

SEQ ID NO: 472026 - DNA, 25 bp, Artificial
  probe
  misc_feature (1)..(25): SEQ ID NO: 7587; WAN024C3G; Start 76; Stop 100
ggtggagttaatagcaacggagaaa

SEQ ID NO: 472027 - DNA, 25 bp, Artificial
  probe
  misc_feature (1)..(25): SEQ ID NO: 7587; WAN024C3G; Start 106; Stop 130
cctgcaatgttaaccataatattca

SEQ ID NO: 472028 - DNA, 25 bp, Artificial
  probe
  misc_feature (1)..(25): SEQ ID NO: 7587; WAN024C3G; Start 193; Stop 217
ctagaaacagataaattgtgtcctc

SEQ ID NO: 472029 - DNA, 25 bp, Artificial
  probe
  misc_feature (1)..(25): SEQ ID NO: 7588; WAN024BSS; Start 3; Stop 27
gctattcagtgttccctatattcca

SEQ ID NO: 472030 - DNA, 25 bp, Artificial
  probe
  misc_feature (1)..(25): SEQ ID NO: 7588; WAN024BSS; Start 2; Stop 26
tgctattcagtgttccctatattcc

SEQ ID NO: 472031 - DNA, 25 bp, Artificial
  probe
  misc_feature (1)..(25): SEQ ID NO: 7588; WAN024BSS; Start 13; Stop 37
gttccctatattccacataagcaat

SEQ ID NO: 472032 - DNA, 25 bp, Artificial
  probe
  misc_feature (1)..(25): SEQ ID NO: 7588; WAN024BSS; Start 1; Stop 25
ttgctattcagtgttccctatattc

SEQ ID NO: 472033 - DNA, 25 bp, Artificial
  probe
  misc_feature (1)..(25): SEQ ID NO: 7588; WAN024BSS; Start 12; Stop 36
tgttccctatattccacataagcaa

SEQ ID NO: 472034 - DNA, 25 bp, Artificial
  probe
  misc_feature (1)..(25): SEQ ID NO: 7588; WAN024BSS; Start 14; Stop 38
ttccctatattccacataagcaatt

SEQ ID NO: 472035 - DNA, 25 bp, Artificial
  probe
  misc_feature (1)..(25): SEQ ID NO: 7588; WAN024BSS; Start 10; Stop 34
agtgttccctatattccacataagc

SEQ ID NO: 472036 - DNA, 25 bp, Artificial
  probe
  misc_feature (1)..(25): SEQ ID NO: 7588; WAN024BSS; Start 11; Stop 35
gtgttccctatattccacataagca

SEQ ID NO: 472037 - DNA, 25 bp, Artificial
  probe
  misc_feature (1)..(25): SEQ ID NO: 7588; WAN024BSS; Start 6; Stop 30
attcagtgttccctatattccacat

SEQ ID NO: 472038 - DNA, 25 bp, Artificial
  probe
  misc_feature (1)..(25): SEQ ID NO: 7588; WAN024BSS; Start 24; Stop 48
tccacataagcaattattagaactt

SEQ ID NO: 472039 - DNA, 25 bp, Artificial
  probe
  misc_feature (1)..(25): SEQ ID NO: 7588; WAN024BSS; Start 23; Stop 47
ttccacataagcaattattagaact

SEQ ID NO: 472040 - DNA, 25 bp, Artificial
  probe
  misc_feature (1)..(25): SEQ ID NO: 7588; WAN024BSS; Start 8; Stop 32
tcagtgttccctatattccacataa

SEQ ID NO: 472041 - DNA, 25 bp, Artificial
  probe
  misc_feature (1)..(25): SEQ ID NO: 7588; WAN024BSS; Start 7; Stop 31
ttcagtgttccctatattccacata

SEQ ID NO: 472042 - DNA, 25 bp, Artificial
  probe
  misc_feature (1)..(25): SEQ ID NO: 7588; WAN024BSS; Start 5; Stop 29
tattcagtgttccctatattccaca

SEQ ID NO: 472043 - DNA, 25 bp, Artificial
  probe
  misc_feature (1)..(25): SEQ ID NO: 7588; WAN024BSS; Start 9; Stop 33
cagtgttccctatattccacataag

SEQ ID NO: 472044 - DNA, 25 bp, Artificial
  probe
  misc_feature (1)..(25): SEQ ID NO: 7588; WAN024BSS; Start 4; Stop 28
ctattcagtgttccctatattccac

SEQ ID NO: 472045 - DNA, 25 bp, Artificial
  probe
  misc_feature (1)..(25): SEQ ID NO: 7588; WAN024BSS; Start 126; Stop 150
aggtattggacaagaattgttggaa

SEQ ID NO: 472046 - DNA, 25 bp, Artificial
  probe
  misc_feature (1)..(25): SEQ ID NO: 7588; WAN024BSS; Start 125; Stop 149
aaggtattggacaagaattgttgga

SEQ ID NO: 472047 - DNA, 25 bp, Artificial
  probe
  misc_feature (1)..(25): SEQ ID NO: 7588; WAN024BSS; Start 15; Stop 39
tccctatattccacataagcaatta

SEQ ID NO: 472048 - DNA, 25 bp, Artificial
  probe
  misc_feature (1)..(25): SEQ ID NO: 7588; WAN024BSS; Start 95; Stop 119
gcggtcgatatgtcacaaagtattt

SEQ ID NO: 472049 - DNA, 25 bp, Artificial
  probe
  misc_feature (1)..(25): SEQ ID NO: 7588; WAN024BSS; Start 63; Stop 87
aaataaagttgacgttgacagcaaa

SEQ ID NO: 472050 - DNA, 25 bp, Artificial
  probe
  misc_feature (1)..(25): SEQ ID NO: 7588; WAN024BSS; Start 64; Stop 88
aataaagttgacgttgacagcaaag

SEQ ID NO: 472051 - DNA, 25 bp, Artificial
  probe
  misc_feature (1)..(25): SEQ ID NO: 7588; WAN024BSS; Start 62; Stop 86
caaataaagttgacgttgacagcaa

SEQ ID NO: 472052 - DNA, 25 bp, Artificial
  probe
  misc_feature (1)..(25): SEQ ID NO: 7588; WAN024BSS; Start 59; Stop 83
gagcaaataaagttgacgttgacag

SEQ ID NO: 472053 - DNA, 25 bp, Artificial
  probe
  misc_feature (1)..(25): SEQ ID NO: 7588; WAN024BSS; Start 65; Stop 89
ataaagttgacgttgacagcaaaga

SEQ ID NO: 472054 - DNA, 25 bp, Artificial
  probe
  misc_feature (1)..(25): SEQ ID NO: 7588; WAN024BSS; Start 56; Stop 80
atggagcaaataaagttgacgttga

SEQ ID NO: 472055 - DNA, 25 bp, Artificial
  probe
  misc_feature (1)..(25): SEQ ID NO: 7588; WAN024BSS; Start 55; Stop 79
catggagcaaataaagttgacgttg

SEQ ID NO: 472056 - DNA, 25 bp, Artificial
  probe
  misc_feature (1)..(25): SEQ ID NO: 7588; WAN024BSS; Start 66; Stop 90
taaagttgacgttgacagcaaagaa

SEQ ID NO: 472057 - DNA, 25 bp, Artificial
  probe
  misc_feature (1)..(25): SEQ ID NO: 7588; WAN024BSS; Start 22; Stop 46
attccacataagcaattattagaac

SEQ ID NO: 472058 - DNA, 25 bp, Artificial
  probe
  misc_feature (1)..(25): SEQ ID NO: 7588; WAN024BSS; Start 242; Stop 266
gttcagtcgtactatatgaaacgga

SEQ ID NO: 472059 - DNA, 25 bp, Artificial
  probe
  misc_feature (1)..(25): SEQ ID NO: 7588; WAN024BSS; Start 241; Stop 265
agttcagtcgtactatatgaaacgg

SEQ ID NO: 472060 - DNA, 25 bp, Artificial
  probe
  misc_feature (1)..(25): SEQ ID NO: 7588; WAN024BSS; Start 137; Stop 161
aagaattgttggaaaacttcggaaa

SEQ ID NO: 472061 - DNA, 25 bp, Artificial
  probe
  misc_feature (1)..(25): SEQ ID NO: 7588; WAN024BSS; Start 243; Stop 267
ttcagtcgtactatatgaaacggaa

SEQ ID NO: 472062 - DNA, 25 bp, Artificial
  probe
  misc_feature (1)..(25): SEQ ID NO: 7589; WAN024DSU; Start 147; Stop 171
taccaatttctcctacttcttgacc

SEQ ID NO: 472063 - DNA, 25 bp, Artificial
  probe
  misc_feature (1)..(25): SEQ ID NO: 7589; WAN024DSU; Start 149; Stop 173
ccaatttctcctacttcttgacctt

SEQ ID NO: 472064 - DNA, 25 bp, Artificial
  probe
  misc_feature (1)..(25): SEQ ID NO: 7589; WAN024DSU; Start 102; Stop 126
ttccatcacgttcatctacagcata

SEQ ID NO: 472065 - DNA, 25 bp, Artificial
  probe
  misc_feature (1)..(25): SEQ ID NO: 7589; WAN024DSU; Start 97; Stop 121
aattgttccatcacgttcatctaca

SEQ ID NO: 472066 - DNA, 25 bp, Artificial
  probe
  misc_feature (1)..(25): SEQ ID NO: 7589; WAN024DSU; Start 150; Stop 174
caatttctcctacttcttgaccttt

SEQ ID NO: 472067 - DNA, 25 bp, Artificial
  probe
  misc_feature (1)..(25): SEQ ID NO: 7589; WAN024DSU; Start 154; Stop 178
ttctcctacttcttgacctttatca

SEQ ID NO: 472068 - DNA, 25 bp, Artificial
  probe
  misc_feature (1)..(25): SEQ ID NO: 7589; WAN024DSU; Start 98; Stop 122
attgttccatcacgttcatctacag

SEQ ID NO: 472069 - DNA, 25 bp, Artificial
  probe
  misc_feature (1)..(25): SEQ ID NO: 7589; WAN024DSU; Start 148; Stop 172
accaatttctcctacttcttgacct

SEQ ID NO: 472070 - DNA, 25 bp, Artificial
  probe
  misc_feature (1)..(25): SEQ ID NO: 7589; WAN024DSU; Start 153; Stop 177
tttctcctacttcttgacctttatc

SEQ ID NO: 472071 - DNA, 25 bp, Artificial
  probe
  misc_feature (1)..(25): SEQ ID NO: 7589; WAN024DSU; Start 146; Stop 170
ttaccaatttctcctacttcttgac

SEQ ID NO: 472072 - DNA, 25 bp, Artificial
  probe
  misc_feature (1)..(25): SEQ ID NO: 7589; WAN024DSU; Start 103; Stop 127
tccatcacgttcatctacagcatag

SEQ ID NO: 472073 - DNA, 25 bp, Artificial
  probe
  misc_feature (1)..(25): SEQ ID NO: 7589; WAN024DSU; Start 119; Stop 143
acagcatagattgtagtaagagtaa

SEQ ID NO: 472074 - DNA, 25 bp, Artificial
  probe
  misc_feature (1)..(25): SEQ ID NO: 7589; WAN024DSU; Start 59; Stop 83
accatctctttagtaatttgacgag

SEQ ID NO: 472075 - DNA, 25 bp, Artificial
  probe
  misc_feature (1)..(25): SEQ ID NO: 7589; WAN024DSU; Start 96; Stop 120
caattgttccatcacgttcatctac

SEQ ID NO: 472076 - DNA, 25 bp, Artificial
  probe
  misc_feature (1)..(25): SEQ ID NO: 7589; WAN024DSU; Start 95; Stop 119
tcaattgttccatcacgttcatcta

SEQ ID NO: 472077 - DNA, 25 bp, Artificial
  probe
  misc_feature (1)..(25): SEQ ID NO: 7589; WAN024DSU; Start 151; Stop 175
aatttctcctacttcttgaccttta

SEQ ID NO: 472078 - DNA, 25 bp, Artificial
  probe
  misc_feature (1)..(25): SEQ ID NO: 7589; WAN024DSU; Start 93; Stop 117
cttcaattgttccatcacgttcatc

SEQ ID NO: 472079 - DNA, 25 bp, Artificial
  probe
  misc_feature (1)..(25): SEQ ID NO: 7589; WAN024DSU; Start 152; Stop 176
atttctcctacttcttgacctttat

SEQ ID NO: 472080 - DNA, 25 bp, Artificial
  probe
  misc_feature (1)..(25): SEQ ID NO: 7589; WAN024DSU; Start 145; Stop 169
tttaccaatttctcctacttcttga

SEQ ID NO: 472081 - DNA, 25 bp, Artificial
  probe
  misc_feature (1)..(25): SEQ ID NO: 7589; WAN024DSU; Start 199; Stop 223
ttctgtttcgattggaatttcttgg

SEQ ID NO: 472082 - DNA, 25 bp, Artificial
  probe
  misc_feature (1)..(25): SEQ ID NO: 7589; WAN024DSU; Start 94; Stop 118
ttcaattgttccatcacgttcatct

SEQ ID NO: 472083 - DNA, 25 bp, Artificial
  probe
  misc_feature (1)..(25): SEQ ID NO: 7589; WAN024DSU; Start 92; Stop 116
tcttcaattgttccatcacgttcat

SEQ ID NO: 472084 - DNA, 25 bp, Artificial
  probe
  misc_feature (1)..(25): SEQ ID NO: 7589; WAN024DSU; Start 58; Stop 82
taccatctctttagtaatttgacga

SEQ ID NO: 472085 - DNA, 25 bp, Artificial
  probe
  misc_feature (1)..(25): SEQ ID NO: 7589; WAN024DSU; Start 183; Stop 207
ttgggtcatcgagatattctgtttc

SEQ ID NO: 472086 - DNA, 25 bp, Artificial
  probe
  misc_feature (1)..(25): SEQ ID NO: 7589; WAN024DSU; Start 91; Stop 115
ttcttcaattgttccatcacgttca

SEQ ID NO: 472087 - DNA, 25 bp, Artificial
  probe
  misc_feature (1)..(25): SEQ ID NO: 7589; WAN024DSU; Start 204; Stop 228
tttcgattggaatttcttggacaag

SEQ ID NO: 472088 - DNA, 25 bp, Artificial
  probe
  misc_feature (1)..(25): SEQ ID NO: 7589; WAN024DSU; Start 201; Stop 225
ctgtttcgattggaatttcttggac

SEQ ID NO: 472089 - DNA, 25 bp, Artificial
  probe
  misc_feature (1)..(25): SEQ ID NO: 7589; WAN024DSU; Start 200; Stop 224
tctgtttcgattggaatttcttgga

SEQ ID NO: 472090 - DNA, 25 bp, Artificial
  probe
  misc_feature (1)..(25): SEQ ID NO: 7589; WAN024DSU; Start 203; Stop 227
gtttcgattggaatttcttggacaa

SEQ ID NO: 472091 - DNA, 25 bp, Artificial
  probe
  misc_feature (1)..(25): SEQ ID NO: 7589; WAN024DSU; Start 182; Stop 206
gttgggtcatcgagatattctgttt

SEQ ID NO: 472092 - DNA, 25 bp, Artificial
  probe
  misc_feature (1)..(25): SEQ ID NO: 7589; WAN024DSU; Start 120; Stop 144
cagcatagattgtagtaagagtaat

SEQ ID NO: 472093 - DNA, 25 bp, Artificial
  probe
  misc_feature (1)..(25): SEQ ID NO: 7589; WAN024DSU; Start 178; Stop 202
aagagttgggtcatcgagatattct

SEQ ID NO: 472094 - DNA, 25 bp, Artificial
  probe
  misc_feature (1)..(25): SEQ ID NO: 7589; WAN024DSU; Start 177; Stop 201
caagagttgggtcatcgagatattc

SEQ ID NO: 472095 - DNA, 25 bp, Artificial
  probe
  misc_feature (1)..(25): SEQ ID NO: 7590; WAN024C55; Start 229; Stop 253
gttgttaagccaatccaaggtctta

SEQ ID NO: 472096 - DNA, 25 bp, Artificial
  probe
  misc_feature (1)..(25): SEQ ID NO: 7590; WAN024C55; Start 226; Stop 250
gaagttgttaagccaatccaaggtc

SEQ ID NO: 472097 - DNA, 25 bp, Artificial
  probe
  misc_feature (1)..(25): SEQ ID NO: 7590; WAN024C55; Start 121; Stop 145
gtcactggtaagaactcagaactct

SEQ ID NO: 472098 - DNA, 25 bp, Artificial
  probe
  misc_feature (1)..(25): SEQ ID NO: 7590; WAN024C55; Start 117; Stop 141
aatcgtcactggtaagaactcagaa

SEQ ID NO: 472099 - DNA, 25 bp, Artificial
  probe
  misc_feature (1)..(25): SEQ ID NO: 7590; WAN024C55; Start 228; Stop 252
agttgttaagccaatccaaggtctt

SEQ ID NO: 472100 - DNA, 25 bp, Artificial
  probe
  misc_feature (1)..(25): SEQ ID NO: 7590; WAN024C55; Start 227; Stop 251
aagttgttaagccaatccaaggtct

SEQ ID NO: 472101 - DNA, 25 bp, Artificial
  probe
  misc_feature (1)..(25): SEQ ID NO: 7590; WAN024C55; Start 118; Stop 142
atcgtcactggtaagaactcagaac

SEQ ID NO: 472102 - DNA, 25 bp, Artificial
  probe
  misc_feature (1)..(25): SEQ ID NO: 7590; WAN024C55; Start 225; Stop 249
tgaagttgttaagccaatccaaggt

SEQ ID NO: 472103 - DNA, 25 bp, Artificial
  probe
  misc_feature (1)..(25): SEQ ID NO: 7590; WAN024C55; Start 122; Stop 146
tcactggtaagaactcagaactctt

SEQ ID NO: 472104 - DNA, 25 bp, Artificial
  probe
  misc_feature (1)..(25): SEQ ID NO: 7590; WAN024C55; Start 120; Stop 144
cgtcactggtaagaactcagaactc

SEQ ID NO: 472105 - DNA, 25 bp, Artificial
  probe
  misc_feature (1)..(25): SEQ ID NO: 7590; WAN024C55; Start 119; Stop 143
tcgtcactggtaagaactcagaact

SEQ ID NO: 472106 - DNA, 25 bp, Artificial
  probe
  misc_feature (1)..(25): SEQ ID NO: 7590; WAN024C55; Start 115; Stop 139
gaaatcgtcactggtaagaactcag

SEQ ID NO: 472107 - DNA, 25 bp, Artificial
  probe
  misc_feature (1)..(25): SEQ ID NO: 7590; WAN024C55; Start 114; Stop 138
ggaaatcgtcactggtaagaactca

SEQ ID NO: 472108 - DNA, 25 bp, Artificial
  probe
  misc_feature (1)..(25): SEQ ID NO: 7590; WAN024C55; Start 116; Stop 140
aaatcgtcactggtaagaactcaga

SEQ ID NO: 472109 - DNA, 25 bp, Artificial
  probe
  misc_feature (1)..(25): SEQ ID NO: 7590; WAN024C55; Start 296; Stop 320
atgaaatcctgattgcacttgctat

SEQ ID NO: 472110 - DNA, 25 bp, Artificial
  probe
  misc_feature (1)..(25): SEQ ID NO: 7590; WAN024C55; Start 295; Stop 319
aatgaaatcctgattgcacttgcta

SEQ ID NO: 472111 - DNA, 25 bp, Artificial
  probe
  misc_feature (1)..(25): SEQ ID NO: 7590; WAN024C55; Start 291; Stop 315
ttcaaatgaaatcctgattgcactt

SEQ ID NO: 472112 - DNA, 25 bp, Artificial
  probe
  misc_feature (1)..(25): SEQ ID NO: 7590; WAN024C55; Start 230; Stop 254
ttgttaagccaatccaaggtcttaa

SEQ ID NO: 472113 - DNA, 25 bp, Artificial
  probe
  misc_feature (1)..(25): SEQ ID NO: 7590; WAN024C55; Start 290; Stop 314
attcaaatgaaatcctgattgcact

SEQ ID NO: 472114 - DNA, 25 bp, Artificial
  probe
  misc_feature (1)..(25): SEQ ID NO: 7590; WAN024C55; Start 289; Stop 313
cattcaaatgaaatcctgattgcac

SEQ ID NO: 472115 - DNA, 25 bp, Artificial
  probe
  misc_feature (1)..(25): SEQ ID NO: 7590; WAN024C55; Start 292; Stop 316
tcaaatgaaatcctgattgcacttg

SEQ ID NO: 472116 - DNA, 25 bp, Artificial
  probe
  misc_feature (1)..(25): SEQ ID NO: 7590; WAN024C55; Start 113; Stop 137
gggaaatcgtcactggtaagaactc

SEQ ID NO: 472117 - DNA, 25 bp, Artificial
  probe
  misc_feature (1)..(25): SEQ ID NO: 7590; WAN024C55; Start 124; Stop 148
actggtaagaactcagaactctttg

SEQ ID NO: 472118 - DNA, 25 bp, Artificial
  probe
  misc_feature (1)..(25): SEQ ID NO: 7590; WAN024C55; Start 123; Stop 147
cactggtaagaactcagaactcttt

SEQ ID NO: 472119 - DNA, 25 bp, Artificial
  probe
  misc_feature (1)..(25): SEQ ID NO: 7590; WAN024C55; Start 297; Stop 321
tgaaatcctgattgcacttgctatc

SEQ ID NO: 472120 - DNA, 25 bp, Artificial
  probe
  misc_feature (1)..(25): SEQ ID NO: 7590; WAN024C55; Start 125; Stop 149
ctggtaagaactcagaactctttgg

SEQ ID NO: 472121 - DNA, 25 bp, Artificial
  probe
  misc_feature (1)..(25): SEQ ID NO: 7590; WAN024C55; Start 294; Stop 318
aaatgaaatcctgattgcacttgct

SEQ ID NO: 472122 - DNA, 25 bp, Artificial
  probe
  misc_feature (1)..(25): SEQ ID NO: 7590; WAN024C55; Start 293; Stop 317
caaatgaaatcctgattgcacttgc

SEQ ID NO: 472123 - DNA, 25 bp, Artificial
  probe
  misc_feature (1)..(25): SEQ ID NO: 7590; WAN024C55; Start 126; Stop 150
tggtaagaactcagaactctttggg

SEQ ID NO: 472124 - DNA, 25 bp, Artificial
  probe
  misc_feature (1)..(25): SEQ ID NO: 7590; WAN024C55; Start 235; Stop 259
aagccaatccaaggtcttaaaatcg

SEQ ID NO: 472125 - DNA, 25 bp, Artificial
  probe
  misc_feature (1)..(25): SEQ ID NO: 7590; WAN024C55; Start 234; Stop 258
taagccaatccaaggtcttaaaatc

SEQ ID NO: 472126 - DNA, 25 bp, Artificial
  probe
  misc_feature (1)..(25): SEQ ID NO: 7590; WAN024C55; Start 300; Stop 324
aatcctgattgcacttgctatcaca

SEQ ID NO: 472127 - DNA, 25 bp, Artificial
  probe
  misc_feature (1)..(25): SEQ ID NO: 7590; WAN024C55; Start 288; Stop 312
tcattcaaatgaaatcctgattgca

SEQ ID NO: 472128 - DNA, 25 bp, Artificial
  probe
  misc_feature (1)..(25): SEQ ID NO: 7591; WAN024BJ3; Start 183; Stop 207
tagttacatagccatcctctccatc

SEQ ID NO: 472129 - DNA, 25 bp, Artificial
  probe
  misc_feature (1)..(25): SEQ ID NO: 7591; WAN024BJ3; Start 186; Stop 210
ttacatagccatcctctccatcaat

SEQ ID NO: 472130 - DNA, 25 bp, Artificial
  probe
  misc_feature (1)..(25): SEQ ID NO: 7591; WAN024BJ3; Start 182; Stop 206
gtagttacatagccatcctctccat

SEQ ID NO: 472131 - DNA, 25 bp, Artificial
  probe
  misc_feature (1)..(25): SEQ ID NO: 7591; WAN024BJ3; Start 187; Stop 211
tacatagccatcctctccatcaatt

SEQ ID NO: 472132 - DNA, 25 bp, Artificial
  probe
  misc_feature (1)..(25): SEQ ID NO: 7591; WAN024BJ3; Start 151; Stop 175
agtctctggattaacatcgtaggtc

SEQ ID NO: 472133 - DNA, 25 bp, Artificial
  probe
  misc_feature (1)..(25): SEQ ID NO: 7591; WAN024BJ3; Start 185; Stop 209
gttacatagccatcctctccatcaa

SEQ ID NO: 472134 - DNA, 25 bp, Artificial
  probe
  misc_feature (1)..(25): SEQ ID NO: 7591; WAN024BJ3; Start 169; Stop 193
gtaggtccttgtcgtagttacatag

SEQ ID NO: 472135 - DNA, 25 bp, Artificial
  probe
  misc_feature (1)..(25): SEQ ID NO: 7591; WAN024BJ3; Start 179; Stop 203
gtcgtagttacatagccatcctctc

SEQ ID NO: 472136 - DNA, 25 bp, Artificial
  probe
  misc_feature (1)..(25): SEQ ID NO: 7591; WAN024BJ3; Start 160; Stop 184
attaacatcgtaggtccttgtcgta

SEQ ID NO: 472137 - DNA, 25 bp, Artificial
  probe
  misc_feature (1)..(25): SEQ ID NO: 7591; WAN024BJ3; Start 170; Stop 194
taggtccttgtcgtagttacatagc

SEQ ID NO: 472138 - DNA, 25 bp, Artificial
  probe
  misc_feature (1)..(25): SEQ ID NO: 7591; WAN024BJ3; Start 168; Stop 192
cgtaggtccttgtcgtagttacata

SEQ ID NO: 472139 - DNA, 25 bp, Artificial
  probe
  misc_feature (1)..(25): SEQ ID NO: 7591; WAN024BJ3; Start 184; Stop 208
agttacatagccatcctctccatca

SEQ ID NO: 472140 - DNA, 25 bp, Artificial
  probe
  misc_feature (1)..(25): SEQ ID NO: 7591; WAN024BJ3; Start 150; Stop 174
cagtctctggattaacatcgtaggt

SEQ ID NO: 472141 - DNA, 25 bp, Artificial
  probe
  misc_feature (1)..(25): SEQ ID NO: 7591; WAN024BJ3; Start 177; Stop 201
ttgtcgtagttacatagccatcctc

SEQ ID NO: 472142 - DNA, 25 bp, Artificial
  probe
  misc_feature (1)..(25): SEQ ID NO: 7591; WAN024BJ3; Start 176; Stop 200
cttgtcgtagttacatagccatcct

SEQ ID NO: 472143 - DNA, 25 bp, Artificial
  probe
  misc_feature (1)..(25): SEQ ID NO: 7591; WAN024BJ3; Start 174; Stop 198
tccttgtcgtagttacatagccatc

SEQ ID NO: 472144 - DNA, 25 bp, Artificial
  probe
  misc_feature (1)..(25): SEQ ID NO: 7591; WAN024BJ3; Start 165; Stop 189
catcgtaggtccttgtcgtagttac

SEQ ID NO: 472145 - DNA, 25 bp, Artificial
  probe
  misc_feature (1)..(25): SEQ ID NO: 7591; WAN024BJ3; Start 161; Stop 185
ttaacatcgtaggtccttgtcgtag

SEQ ID NO: 472146 - DNA, 25 bp, Artificial
  probe
  misc_feature (1)..(25): SEQ ID NO: 7591; WAN024BJ3; Start 92; Stop 116
ttgataactgtatccgtggcttctt

SEQ ID NO: 472147 - DNA, 25 bp, Artificial
  probe
  misc_feature (1)..(25): SEQ ID NO: 7591; WAN024BJ3; Start 173; Stop 197
gtccttgtcgtagttacatagccat

SEQ ID NO: 472148 - DNA, 25 bp, Artificial
  probe
  misc_feature (1)..(25): SEQ ID NO: 7591; WAN024BJ3; Start 180; Stop 204
tcgtagttacatagccatcctctcc

SEQ ID NO: 472149 - DNA, 25 bp, Artificial
  probe
  misc_feature (1)..(25): SEQ ID NO: 7591; WAN024BJ3; Start 154; Stop 178
ctctggattaacatcgtaggtcctt

SEQ ID NO: 472150 - DNA, 25 bp, Artificial
  probe
  misc_feature (1)..(25): SEQ ID NO: 7591; WAN024BJ3; Start 21; Stop 45
ggtcattgtctgcttcatatttagt

SEQ ID NO: 472151 - DNA, 25 bp, Artificial
  probe
  misc_feature (1)..(25): SEQ ID NO: 7591; WAN024BJ3; Start 17; Stop 41
gaaaggtcattgtctgcttcatatt

SEQ ID NO: 472152 - DNA, 25 bp, Artificial
  probe
  misc_feature (1)..(25): SEQ ID NO: 7591; WAN024BJ3; Start 16; Stop 40
agaaaggtcattgtctgcttcatat

SEQ ID NO: 472153 - DNA, 25 bp, Artificial
  probe
  misc_feature (1)..(25): SEQ ID NO: 7591; WAN024BJ3; Start 155; Stop 179
tctggattaacatcgtaggtccttg

SEQ ID NO: 472154 - DNA, 25 bp, Artificial
  probe
  misc_feature (1)..(25): SEQ ID NO: 7591; WAN024BJ3; Start 20; Stop 44
aggtcattgtctgcttcatatttag

SEQ ID NO: 472155 - DNA, 25 bp, Artificial
  probe
  misc_feature (1)..(25): SEQ ID NO: 7591; WAN024BJ3; Start 18; Stop 42
aaaggtcattgtctgcttcatattt

SEQ ID NO: 472156 - DNA, 25 bp, Artificial
  probe
  misc_feature (1)..(25): SEQ ID NO: 7591; WAN024BJ3; Start 159; Stop 183
gattaacatcgtaggtccttgtcgt

SEQ ID NO: 472157 - DNA, 25 bp, Artificial
  probe
  misc_feature (1)..(25): SEQ ID NO: 7591; WAN024BJ3; Start 181; Stop 205
cgtagttacatagccatcctctcca

SEQ ID NO: 472158 - DNA, 25 bp, Artificial
  probe
  misc_feature (1)..(25): SEQ ID NO: 7591; WAN024BJ3; Start 178; Stop 202
tgtcgtagttacatagccatcctct

SEQ ID NO: 472159 - DNA, 25 bp, Artificial
  probe
  misc_feature (1)..(25): SEQ ID NO: 7591; WAN024BJ3; Start 157; Stop 181
tggattaacatcgtaggtccttgtc

SEQ ID NO: 472160 - DNA, 25 bp, Artificial
  probe
  misc_feature (1)..(25): SEQ ID NO: 7591; WAN024BJ3; Start 156; Stop 180
ctggattaacatcgtaggtccttgt

SEQ ID NO: 472161 - DNA, 25 bp, Artificial
  probe
  misc_feature (1)..(25): SEQ ID NO: 7592; WAN024BSG; Start 72; Stop 96
tctatctcaagaagttgcagacgat

SEQ ID NO: 472162 - DNA, 25 bp, Artificial
  probe
  misc_feature (1)..(25): SEQ ID NO: 7592; WAN024BSG; Start 71; Stop 95
ttctatctcaagaagttgcagacga

SEQ ID NO: 472163 - DNA, 25 bp, Artificial
  probe
  misc_feature (1)..(25): SEQ ID NO: 7592; WAN024BSG; Start 44; Stop 68
gaaccatgctgcgaaaaggaatatt

SEQ ID NO: 472164 - DNA, 25 bp, Artificial
  probe
  misc_feature (1)..(25): SEQ ID NO: 7592; WAN024BSG; Start 43; Stop 67
ggaaccatgctgcgaaaaggaatat

SEQ ID NO: 472165 - DNA, 25 bp, Artificial
  probe
  misc_feature (1)..(25): SEQ ID NO: 7592; WAN024BSG; Start 4; Stop 28
ctcgttctcctttctcaggtcgaag

SEQ ID NO: 472166 - DNA, 25 bp, Artificial
  probe
  misc_feature (1)..(25): SEQ ID NO: 7592; WAN024BSG; Start 6; Stop 30
cgttctcctttctcaggtcgaagtg

SEQ ID NO: 472167 - DNA, 25 bp, Artificial
  probe
  misc_feature (1)..(25): SEQ ID NO: 7592; WAN024BSG; Start 45; Stop 69
aaccatgctgcgaaaaggaatattc

SEQ ID NO: 472168 - DNA, 25 bp, Artificial
  probe
  misc_feature (1)..(25): SEQ ID NO: 7593; WAN024GJM; Start 60; Stop 84
cgtgatttccaatcttctccagttt

SEQ ID NO: 472169 - DNA, 25 bp, Artificial
  probe
  misc_feature (1)..(25): SEQ ID NO: 7593; WAN024GJM; Start 3; Stop 27
gctctgttctggtaggagtttgatc

SEQ ID NO: 472170 - DNA, 25 bp, Artificial
  probe
  misc_feature (1)..(25): SEQ ID NO: 7593; WAN024GJM; Start 24; Stop 48
gatcaatactctgaagttggccgat

SEQ ID NO: 472171 - DNA, 25 bp, Artificial
  probe
  misc_feature (1)..(25): SEQ ID NO: 7593; WAN024GJM; Start 2; Stop 26
tgctctgttctggtaggagtttgat

SEQ ID NO: 472172 - DNA, 25 bp, Artificial
  probe
  misc_feature (1)..(25): SEQ ID NO: 7593; WAN024GJM; Start 1; Stop 25
ttgctctgttctggtaggagtttga

SEQ ID NO: 472173 - DNA, 25 bp, Artificial
  probe
  misc_feature (1)..(25): SEQ ID NO: 7593; WAN024GJM; Start 28; Stop 52
aatactctgaagttggccgatgatg

SEQ ID NO: 472174 - DNA, 25 bp, Artificial
  probe
  misc_feature (1)..(25): SEQ ID NO: 7593; WAN024GJM; Start 27; Stop 51
caatactctgaagttggccgatgat

SEQ ID NO: 472175 - DNA, 25 bp, Artificial
  probe
  misc_feature (1)..(25): SEQ ID NO: 7593; WAN024GJM; Start 25; Stop 49
atcaatactctgaagttggccgatg

SEQ ID NO: 472176 - DNA, 25 bp, Artificial
  probe
  misc_feature (1)..(25): SEQ ID NO: 7593; WAN024GJM; Start 59; Stop 83
ccgtgatttccaatcttctccagtt

SEQ ID NO: 472177 - DNA, 25 bp, Artificial
  probe
  misc_feature (1)..(25): SEQ ID NO: 7593; WAN024GJM; Start 26; Stop 50
tcaatactctgaagttggccgatga

SEQ ID NO: 472178 - DNA, 25 bp, Artificial
  probe
  misc_feature (1)..(25): SEQ ID NO: 7593; WAN024GJM; Start 4; Stop 28
ctctgttctggtaggagtttgatca

SEQ ID NO: 472179 - DNA, 25 bp, Artificial
  probe
  misc_feature (1)..(25): SEQ ID NO: 7593; WAN024GJM; Start 23; Stop 47
tgatcaatactctgaagttggccga

SEQ ID NO: 472180 - DNA, 25 bp, Artificial
  probe
  misc_feature (1)..(25): SEQ ID NO: 7593; WAN024GJM; Start 29; Stop 53
atactctgaagttggccgatgatgg

SEQ ID NO: 472181 - DNA, 25 bp, Artificial
  probe
  misc_feature (1)..(25): SEQ ID NO: 7593; WAN024GJM; Start 58; Stop 82
gccgtgatttccaatcttctccagt

SEQ ID NO: 472182 - DNA, 25 bp, Artificial
  probe
  misc_feature (1)..(25): SEQ ID NO: 7593; WAN024GJM; Start 57; Stop 81
tgccgtgatttccaatcttctccag

SEQ ID NO: 472183 - DNA, 25 bp, Artificial
  probe
  misc_feature (1)..(25): SEQ ID NO: 7595; WAN024AXT; Start 69; Stop 93
ctttgccaacaaatttactttcttg

SEQ ID NO: 472184 - DNA, 25 bp, Artificial
  probe
  misc_feature (1)..(25): SEQ ID NO: 7595; WAN024AXT; Start 68; Stop 92
tctttgccaacaaatttactttctt

SEQ ID NO: 472185 - DNA, 25 bp, Artificial
  probe
  misc_feature (1)..(25): SEQ ID NO: 7595; WAN024AXT; Start 67; Stop 91
ttctttgccaacaaatttactttct

SEQ ID NO: 472186 - DNA, 25 bp, Artificial
  probe
  misc_feature (1)..(25): SEQ ID NO: 7595; WAN024AXT; Start 65; Stop 89
tcttctttgccaacaaatttacttt

SEQ ID NO: 472187 - DNA, 25 bp, Artificial
  probe
  misc_feature (1)..(25): SEQ ID NO: 7595; WAN024AXT; Start 25; Stop 49
tctaccaagaaaactaaccatgatt

SEQ ID NO: 472188 - DNA, 25 bp, Artificial
  probe
  misc_feature (1)..(25): SEQ ID NO: 7595; WAN024AXT; Start 26; Stop 50
ctaccaagaaaactaaccatgattc

SEQ ID NO: 472189 - DNA, 25 bp, Artificial
  probe
  misc_feature (1)..(25): SEQ ID NO: 7595; WAN024AXT; Start 66; Stop 90
cttctttgccaacaaatttactttc

SEQ ID NO: 472190 - DNA, 25 bp, Artificial
  probe
  misc_feature (1)..(25): SEQ ID NO: 7595; WAN024AXT; Start 64; Stop 88
atcttctttgccaacaaatttactt

SEQ ID NO: 472191 - DNA, 25 bp, Artificial
  probe
  misc_feature (1)..(25): SEQ ID NO: 7595; WAN024AXT; Start 63; Stop 87
aatcttctttgccaacaaatttact

SEQ ID NO: 472192 - DNA, 25 bp, Artificial
  probe
  misc_feature (1)..(25): SEQ ID NO: 7595; WAN024AXT; Start 70; Stop 94
tttgccaacaaatttactttcttgt

SEQ ID NO: 472193 - DNA, 25 bp, Artificial
  probe
  misc_feature (1)..(25): SEQ ID NO: 7595; WAN024AXT; Start 62; Stop 86
aaatcttctttgccaacaaatttac

SEQ ID NO: 472194 - DNA, 25 bp, Artificial
  probe
  misc_feature (1)..(25): SEQ ID NO: 7595; WAN024AXT; Start 28; Stop 52
accaagaaaactaaccatgattcta

SEQ ID NO: 472195 - DNA, 25 bp, Artificial
  probe
  misc_feature (1)..(25): SEQ ID NO: 7595; WAN024AXT; Start 27; Stop 51
taccaagaaaactaaccatgattct

SEQ ID NO: 472196 - DNA, 25 bp, Artificial
  probe
  misc_feature (1)..(25): SEQ ID NO: 7595; WAN024AXT; Start 24; Stop 48
ttctaccaagaaaactaaccatgat

SEQ ID NO: 472197 - DNA, 25 bp, Artificial
  probe
  misc_feature (1)..(25): SEQ ID NO: 7595; WAN024AXT; Start 29; Stop 53
ccaagaaaactaaccatgattctag

SEQ ID NO: 472198 - DNA, 25 bp, Artificial
  probe
  misc_feature (1)..(25): SEQ ID NO: 7595; WAN024AXT; Start 33; Stop 57
gaaaactaaccatgattctagtgaa

SEQ ID NO: 472199 - DNA, 25 bp, Artificial
  probe
  misc_feature (1)..(25): SEQ ID NO: 7595; WAN024AXT; Start 32; Stop 56
agaaaactaaccatgattctagtga

SEQ ID NO: 472200 - DNA, 25 bp, Artificial
  probe
  misc_feature (1)..(25): SEQ ID NO: 7595; WAN024AXT; Start 35; Stop 59
aaactaaccatgattctagtgaaaa

SEQ ID NO: 472201 - DNA, 25 bp, Artificial
  probe
  misc_feature (1)..(25): SEQ ID NO: 7595; WAN024AXT; Start 34; Stop 58
aaaactaaccatgattctagtgaaa

SEQ ID NO: 472202 - DNA, 25 bp, Artificial
  probe
  misc_feature (1)..(25): SEQ ID NO: 7595; WAN024AXT; Start 31; Stop 55
aagaaaactaaccatgattctagtg

SEQ ID NO: 472203 - DNA, 25 bp, Artificial
  probe
  misc_feature (1)..(25): SEQ ID NO: 7595; WAN024AXT; Start 30; Stop 54
caagaaaactaaccatgattctagt

SEQ ID NO: 472204 - DNA, 25 bp, Artificial
  probe
  misc_feature (1)..(25): SEQ ID NO: 7595; WAN024AXT; Start 61; Stop 85
aaaatcttctttgccaacaaattta

SEQ ID NO: 472205 - DNA, 25 bp, Artificial
  probe
  misc_feature (1)..(25): SEQ ID NO: 7595; WAN024AXT; Start 23; Stop 47
tttctaccaagaaaactaaccatga

SEQ ID NO: 472206 - DNA, 25 bp, Artificial
  probe
  misc_feature (1)..(25): SEQ ID NO: 7595; WAN024AXT; Start 22; Stop 46
atttctaccaagaaaactaaccatg

SEQ ID NO: 472207 - DNA, 25 bp, Artificial
  probe
  misc_feature (1)..(25): SEQ ID NO: 7595; WAN024AXT; Start 21; Stop 45
tatttctaccaagaaaactaaccat

SEQ ID NO: 472208 - DNA, 25 bp, Artificial
  probe
  misc_feature (1)..(25): SEQ ID NO: 7595; WAN024AXT; Start 20; Stop 44
atatttctaccaagaaaactaacca

SEQ ID NO: 472209 - DNA, 25 bp, Artificial
  probe
  misc_feature (1)..(25): SEQ ID NO: 7595; WAN024AXT; Start 19; Stop 43
aatatttctaccaagaaaactaacc

SEQ ID NO: 472210 - DNA, 25 bp, Artificial
  probe
  misc_feature (1)..(25): SEQ ID NO: 7596; WAN024BKV; Start 363; Stop 387
aacagtctatatggcttatccttgg

SEQ ID NO: 472211 - DNA, 25 bp, Artificial
  probe
  misc_feature (1)..(25): SEQ ID NO: 7596; WAN024BKV; Start 365; Stop 389
cagtctatatggcttatccttggta

SEQ ID NO: 472212 - DNA, 25 bp, Artificial
  probe
  misc_feature (1)..(25): SEQ ID NO: 7596; WAN024BKV; Start 364; Stop 388
acagtctatatggcttatccttggt

SEQ ID NO: 472213 - DNA, 25 bp, Artificial
  probe
  misc_feature (1)..(25): SEQ ID NO: 7596; WAN024BKV; Start 1567; Stop 1591
aatgagatgactgtcctgttgaatt

SEQ ID NO: 472214 - DNA, 25 bp, Artificial
  probe
  misc_feature (1)..(25): SEQ ID NO: 7596; WAN024BKV; Start 1237; Stop 1261
gcaaccatctatattcctgagaagt

SEQ ID NO: 472215 - DNA, 25 bp, Artificial
  probe
  misc_feature (1)..(25): SEQ ID NO: 7596; WAN024BKV; Start 1236; Stop 1260
agcaaccatctatattcctgagaag

SEQ ID NO: 472216 - DNA, 25 bp, Artificial
  probe
  misc_feature (1)..(25): SEQ ID NO: 7596; WAN024BKV; Start 1238; Stop 1262
caaccatctatattcctgagaagtg

SEQ ID NO: 472217 - DNA, 25 bp, Artificial
  probe
  misc_feature (1)..(25): SEQ ID NO: 7596; WAN024BKV; Start 1235; Stop 1259
tagcaaccatctatattcctgagaa

SEQ ID NO: 472218 - DNA, 25 bp, Artificial
  probe
  misc_feature (1)..(25): SEQ ID NO: 7596; WAN024BKV; Start 366; Stop 390
agtctatatggcttatccttggtat

SEQ ID NO: 472219 - DNA, 25 bp, Artificial
  probe
  misc_feature (1)..(25): SEQ ID NO: 7596; WAN024BKV; Start 1458; Stop 1482
tatagttgttgtgttagatacggac

SEQ ID NO: 472220 - DNA, 25 bp, Artificial
  probe
  misc_feature (1)..(25): SEQ ID NO: 7596; WAN024BKV; Start 1459; Stop 1483
atagttgttgtgttagatacggaca

SEQ ID NO: 472221 - DNA, 25 bp, Artificial
  probe
  misc_feature (1)..(25): SEQ ID NO: 7596; WAN024BKV; Start 1282; Stop 1306
attgagaatacagttgtagcagaac

SEQ ID NO: 472222 - DNA, 25 bp, Artificial
  probe
  misc_feature (1)..(25): SEQ ID NO: 7596; WAN024BKV; Start 973; Stop 997
gaagttaatgattcagatggtcagt

SEQ ID NO: 472223 - DNA, 25 bp, Artificial
  probe
  misc_feature (1)..(25): SEQ ID NO: 7596; WAN024BKV; Start 970; Stop 994
agagaagttaatgattcagatggtc

SEQ ID NO: 472224 - DNA, 25 bp, Artificial
  probe
  misc_feature (1)..(25): SEQ ID NO: 7596; WAN024BKV; Start 972; Stop 996
agaagttaatgattcagatggtcag

SEQ ID NO: 472225 - DNA, 25 bp, Artificial
  probe
  misc_feature (1)..(25): SEQ ID NO: 7596; WAN024BKV; Start 971; Stop 995
gagaagttaatgattcagatggtca

SEQ ID NO: 472226 - DNA, 25 bp, Artificial
  probe
  misc_feature (1)..(25): SEQ ID NO: 7596; WAN024BKV; Start 1283; Stop 1307
ttgagaatacagttgtagcagaaca

SEQ ID NO: 472227 - DNA, 25 bp, Artificial
  probe
  misc_feature (1)..(25): SEQ ID NO: 7596; WAN024BKV; Start 1234; Stop 1258
atagcaaccatctatattcctgaga

SEQ ID NO: 472228 - DNA, 25 bp, Artificial
  probe
  misc_feature (1)..(25): SEQ ID NO: 7596; WAN024BKV; Start 1280; Stop 1304
ctattgagaatacagttgtagcaga

SEQ ID NO: 472229 - DNA, 25 bp, Artificial
  probe
  misc_feature (1)..(25): SEQ ID NO: 7596; WAN024BKV; Start 1279; Stop 1303
tctattgagaatacagttgtagcag

SEQ ID NO: 472230 - DNA, 25 bp, Artificial
  probe
  misc_feature (1)..(25): SEQ ID NO: 7596; WAN024BKV; Start 1233; Stop 1257
gatagcaaccatctatattcctgag

SEQ ID NO: 472231 - DNA, 25 bp, Artificial
  probe
  misc_feature (1)..(25): SEQ ID NO: 7596; WAN024BKV; Start 989; Stop 1013
atggtcagtatctacagatagttgc

SEQ ID NO: 472232 - DNA, 25 bp, Artificial
  probe
  misc_feature (1)..(25): SEQ ID NO: 7596; WAN024BKV; Start 990; Stop 1014
tggtcagtatctacagatagttgct

SEQ ID NO: 472233 - DNA, 25 bp, Artificial
  probe
  misc_feature (1)..(25): SEQ ID NO: 7596; WAN024BKV; Start 996; Stop 1020
gtatctacagatagttgctgcctta

SEQ ID NO: 472234 - DNA, 25 bp, Artificial
  probe
  misc_feature (1)..(25): SEQ ID NO: 7596; WAN024BKV; Start 991; Stop 1015
ggtcagtatctacagatagttgctg

SEQ ID NO: 472235 - DNA, 25 bp, Artificial
  probe
  misc_feature (1)..(25): SEQ ID NO: 7596; WAN024BKV; Start 1457; Stop 1481
atatagttgttgtgttagatacgga

SEQ ID NO: 472236 - DNA, 25 bp, Artificial
  probe
  misc_feature (1)..(25): SEQ ID NO: 7596; WAN024BKV; Start 1240; Stop 1264
accatctatattcctgagaagtgga

SEQ ID NO: 472237 - DNA, 25 bp, Artificial
  probe
  misc_feature (1)..(25): SEQ ID NO: 7596; WAN024BKV; Start 1239; Stop 1263
aaccatctatattcctgagaagtgg

SEQ ID NO: 472238 - DNA, 25 bp, Artificial
  probe
  misc_feature (1)..(25): SEQ ID NO: 7596; WAN024BKV; Start 992; Stop 1016
gtcagtatctacagatagttgctgc

SEQ ID NO: 472239 - DNA, 25 bp, Artificial
  probe
  misc_feature (1)..(25): SEQ ID NO: 7596; WAN024BKV; Start 997; Stop 1021
tatctacagatagttgctgccttaa

SEQ ID NO: 472240 - DNA, 25 bp, Artificial
  probe
  misc_feature (1)..(25): SEQ ID NO: 7596; WAN024BKV; Start 974; Stop 998
aagttaatgattcagatggtcagta

SEQ ID NO: 472241 - DNA, 25 bp, Artificial
  probe
  misc_feature (1)..(25): SEQ ID NO: 7596; WAN024BKV; Start 1281; Stop 1305
tattgagaatacagttgtagcagaa

SEQ ID NO: 472242 - DNA, 25 bp, Artificial
  probe
  misc_feature (1)..(25): SEQ ID NO: 7596; WAN024BKV; Start 995; Stop 1019
agtatctacagatagttgctgcctt

SEQ ID NO: 472243 - DNA, 25 bp, Artificial
  probe
  misc_feature (1)..(25): SEQ ID NO: 7597; WAN024F74; Start 35; Stop 59
ccaatagtaggtcagatggctatga

SEQ ID NO: 472244 - DNA, 25 bp, Artificial
  probe
  misc_feature (1)..(25): SEQ ID NO: 7597; WAN024F74; Start 34; Stop 58
tccaatagtaggtcagatggctatg

SEQ ID NO: 472245 - DNA, 25 bp, Artificial
  probe
  misc_feature (1)..(25): SEQ ID NO: 7597; WAN024F74; Start 33; Stop 57
gtccaatagtaggtcagatggctat

SEQ ID NO: 472246 - DNA, 25 bp, Artificial
  probe
  misc_feature (1)..(25): SEQ ID NO: 7597; WAN024F74; Start 65; Stop 89
tagaacccgataagaagtttcatcc

SEQ ID NO: 472247 - DNA, 25 bp, Artificial
  probe
  misc_feature (1)..(25): SEQ ID NO: 7597; WAN024F74; Start 64; Stop 88
ctagaacccgataagaagtttcatc

SEQ ID NO: 472248 - DNA, 25 bp, Artificial
  probe
  misc_feature (1)..(25): SEQ ID NO: 7597; WAN024F74; Start 46; Stop 70
tcagatggctatgactctctagaac

SEQ ID NO: 472249 - DNA, 25 bp, Artificial
  probe
  misc_feature (1)..(25): SEQ ID NO: 7597; WAN024F74; Start 143; Stop 167
ctttaggaataggagctttcacaag

SEQ ID NO: 472250 - DNA, 25 bp, Artificial
  probe
  misc_feature (1)..(25): SEQ ID NO: 7597; WAN024F74; Start 32; Stop 56
ggtccaatagtaggtcagatggcta

SEQ ID NO: 472251 - DNA, 25 bp, Artificial
  probe
  misc_feature (1)..(25): SEQ ID NO: 7597; WAN024F74; Start 47; Stop 71
cagatggctatgactctctagaacc

SEQ ID NO: 472252 - DNA, 25 bp, Artificial
  probe
  misc_feature (1)..(25): SEQ ID NO: 7597; WAN024F74; Start 66; Stop 90
agaacccgataagaagtttcatccg

SEQ ID NO: 472253 - DNA, 25 bp, Artificial
  probe
  misc_feature (1)..(25): SEQ ID NO: 7597; WAN024F74; Start 29; Stop 53
aaaggtccaatagtaggtcagatgg

SEQ ID NO: 472254 - DNA, 25 bp, Artificial
  probe
  misc_feature (1)..(25): SEQ ID NO: 7597; WAN024F74; Start 28; Stop 52
aaaaggtccaatagtaggtcagatg

SEQ ID NO: 472255 - DNA, 25 bp, Artificial
  probe
  misc_feature (1)..(25): SEQ ID NO: 7597; WAN024F74; Start 30; Stop 54
aaggtccaatagtaggtcagatggc

SEQ ID NO: 472256 - DNA, 25 bp, Artificial
  probe
  misc_feature (1)..(25): SEQ ID NO: 7597; WAN024F74; Start 54; Stop 78
ctatgactctctagaacccgataag

SEQ ID NO: 472257 - DNA, 25 bp, Artificial
  probe
  misc_feature (1)..(25): SEQ ID NO: 7597; WAN024F74; Start 62; Stop 86
ctctagaacccgataagaagtttca

SEQ ID NO: 472258 - DNA, 25 bp, Artificial
  probe
  misc_feature (1)..(25): SEQ ID NO: 7597; WAN024F74; Start 56; Stop 80
atgactctctagaacccgataagaa

SEQ ID NO: 472259 - DNA, 25 bp, Artificial
  probe
  misc_feature (1)..(25): SEQ ID NO: 7597; WAN024F74; Start 53; Stop 77
gctatgactctctagaacccgataa

SEQ ID NO: 472260 - DNA, 25 bp, Artificial
  probe
  misc_feature (1)..(25): SEQ ID NO: 7597; WAN024F74; Start 61; Stop 85
tctctagaacccgataagaagtttc

SEQ ID NO: 472261 - DNA, 25 bp, Artificial
  probe
  misc_feature (1)..(25): SEQ ID NO: 7597; WAN024F74; Start 60; Stop 84
ctctctagaacccgataagaagttt

SEQ ID NO: 472262 - DNA, 25 bp, Artificial
  probe
  misc_feature (1)..(25): SEQ ID NO: 7597; WAN024F74; Start 55; Stop 79
tatgactctctagaacccgataaga

SEQ ID NO: 472263 - DNA, 25 bp, Artificial
  probe
  misc_feature (1)..(25): SEQ ID NO: 7597; WAN024F74; Start 5; Stop 29
ttgattctcaactttcccagacaaa

SEQ ID NO: 472264 - DNA, 25 bp, Artificial
  probe
  misc_feature (1)..(25): SEQ ID NO: 7597; WAN024F74; Start 63; Stop 87
tctagaacccgataagaagtttcat

SEQ ID NO: 472265 - DNA, 25 bp, Artificial
  probe
  misc_feature (1)..(25): SEQ ID NO: 7597; WAN024F74; Start 57; Stop 81
tgactctctagaacccgataagaag

SEQ ID NO: 472266 - DNA, 25 bp, Artificial
  probe
  misc_feature (1)..(25): SEQ ID NO: 7597; WAN024F74; Start 59; Stop 83
actctctagaacccgataagaagtt

SEQ ID NO: 472267 - DNA, 25 bp, Artificial
  probe
  misc_feature (1)..(25): SEQ ID NO: 7597; WAN024F74; Start 6; Stop 30
tgattctcaactttcccagacaaaa

SEQ ID NO: 472268 - DNA, 25 bp, Artificial
  probe
  misc_feature (1)..(25): SEQ ID NO: 7597; WAN024F74; Start 4; Stop 28
cttgattctcaactttcccagacaa

SEQ ID NO: 472269 - DNA, 25 bp, Artificial
  probe
  misc_feature (1)..(25): SEQ ID NO: 7597; WAN024F74; Start 37; Stop 61
aatagtaggtcagatggctatgact

SEQ ID NO: 472270 - DNA, 25 bp, Artificial
  probe
  misc_feature (1)..(25): SEQ ID NO: 7597; WAN024F74; Start 36; Stop 60
caatagtaggtcagatggctatgac

SEQ ID NO: 472271 - DNA, 25 bp, Artificial
  probe
  misc_feature (1)..(25): SEQ ID NO: 7597; WAN024F74; Start 58; Stop 82
gactctctagaacccgataagaagt

SEQ ID NO: 472272 - DNA, 25 bp, Artificial
  probe
  misc_feature (1)..(25): SEQ ID NO: 7597; WAN024F74; Start 38; Stop 62
atagtaggtcagatggctatgactc

SEQ ID NO: 472273 - DNA, 25 bp, Artificial
  probe
  misc_feature (1)..(25): SEQ ID NO: 7597; WAN024F74; Start 142; Stop 166
gctttaggaataggagctttcacaa

SEQ ID NO: 472274 - DNA, 25 bp, Artificial
  probe
  misc_feature (1)..(25): SEQ ID NO: 7597; WAN024F74; Start 42; Stop 66
taggtcagatggctatgactctcta

SEQ ID NO: 472275 - DNA, 25 bp, Artificial
  probe
  misc_feature (1)..(25): SEQ ID NO: 7597; WAN024F74; Start 39; Stop 63
tagtaggtcagatggctatgactct

SEQ ID NO: 472276 - DNA, 25 bp, Artificial
  probe
  misc_feature (1)..(25): SEQ ID NO: 7599; WAN024GH3; Start 99; Stop 123
tcgctttctgctgacactaactaat

SEQ ID NO: 472277 - DNA, 25 bp, Artificial
  probe
  misc_feature (1)..(25): SEQ ID NO: 7599; WAN024GH3; Start 7; Stop 31
tctactgttttgttggacttcatca

SEQ ID NO: 472278 - DNA, 25 bp, Artificial
  probe
  misc_feature (1)..(25): SEQ ID NO: 7599; WAN024GH3; Start 4; Stop 28
ctttctactgttttgttggacttca

SEQ ID NO: 472279 - DNA, 25 bp, Artificial
  probe
  misc_feature (1)..(25): SEQ ID NO: 7599; WAN024GH3; Start 6; Stop 30
ttctactgttttgttggacttcatc

SEQ ID NO: 472280 - DNA, 25 bp, Artificial
  probe
  misc_feature (1)..(25): SEQ ID NO: 7599; WAN024GH3; Start 3; Stop 27
gctttctactgttttgttggacttc

SEQ ID NO: 472281 - DNA, 25 bp, Artificial
  probe
  misc_feature (1)..(25): SEQ ID NO: 7599; WAN024GH3; Start 5; Stop 29
tttctactgttttgttggacttcat

SEQ ID NO: 472282 - DNA, 25 bp, Artificial
  probe
  misc_feature (1)..(25): SEQ ID NO: 7599; WAN024GH3; Start 2; Stop 26
tgctttctactgttttgttggactt

SEQ ID NO: 472283 - DNA, 25 bp, Artificial
  probe
  misc_feature (1)..(25): SEQ ID NO: 7599; WAN024GH3; Start 1; Stop 25
ttgctttctactgttttgttggact

SEQ ID NO: 472284 - DNA, 25 bp, Artificial
  probe
  misc_feature (1)..(25): SEQ ID NO: 7599; WAN024GH3; Start 98; Stop 122
gtcgctttctgctgacactaactaa

SEQ ID NO: 472285 - DNA, 25 bp, Artificial
  probe
  misc_feature (1)..(25): SEQ ID NO: 7599; WAN024GH3; Start 83; Stop 107
aaataaaacttctcagtcgctttct

SEQ ID NO: 472286 - DNA, 25 bp, Artificial
  probe
  misc_feature (1)..(25): SEQ ID NO: 7599; WAN024GH3; Start 48; Stop 72
aattccggccaataagaccaataaa

SEQ ID NO: 472287 - DNA, 25 bp, Artificial
  probe
  misc_feature (1)..(25): SEQ ID NO: 7599; WAN024GH3; Start 47; Stop 71
aaattccggccaataagaccaataa

SEQ ID NO: 472288 - DNA, 25 bp, Artificial
  probe
  misc_feature (1)..(25): SEQ ID NO: 7599; WAN024GH3; Start 46; Stop 70
gaaattccggccaataagaccaata

SEQ ID NO: 472289 - DNA, 25 bp, Artificial
  probe
  misc_feature (1)..(25): SEQ ID NO: 7599; WAN024GH3; Start 84; Stop 108
aataaaacttctcagtcgctttctg

SEQ ID NO: 472290 - DNA, 25 bp, Artificial
  probe
  misc_feature (1)..(25): SEQ ID NO: 7599; WAN024GH3; Start 82; Stop 106
aaaataaaacttctcagtcgctttc

SEQ ID NO: 472291 - DNA, 25 bp, Artificial
  probe
  misc_feature (1)..(25): SEQ ID NO: 7599; WAN024GH3; Start 8; Stop 32
ctactgttttgttggacttcatcag

SEQ ID NO: 472292 - DNA, 25 bp, Artificial
  probe
  misc_feature (1)..(25): SEQ ID NO: 7599; WAN024GH3; Start 9; Stop 33
tactgttttgttggacttcatcaga

SEQ ID NO: 472293 - DNA, 25 bp, Artificial
  probe
  misc_feature (1)..(25): SEQ ID NO: 7599; WAN024GH3; Start 55; Stop 79
gccaataagaccaataaaatcagaa

SEQ ID NO: 472294 - DNA, 25 bp, Artificial
  probe
  misc_feature (1)..(25): SEQ ID NO: 7599; WAN024GH3; Start 11; Stop 35
ctgttttgttggacttcatcagagt

SEQ ID NO: 472295 - DNA, 25 bp, Artificial
  probe
  misc_feature (1)..(25): SEQ ID NO: 7599; WAN024GH3; Start 10; Stop 34
actgttttgttggacttcatcagag

SEQ ID NO: 472296 - DNA, 25 bp, Artificial
  probe
  misc_feature (1)..(25): SEQ ID NO: 7599; WAN024GH3; Start 97; Stop 121
agtcgctttctgctgacactaacta

SEQ ID NO: 472297 - DNA, 25 bp, Artificial
  probe
  misc_feature (1)..(25): SEQ ID NO: 7599; WAN024GH3; Start 85; Stop 109
ataaaacttctcagtcgctttctgc

SEQ ID NO: 472298 - DNA, 25 bp, Artificial
  probe
  misc_feature (1)..(25): SEQ ID NO: 7599; WAN024GH3; Start 15; Stop 39
tttgttggacttcatcagagtcaaa

SEQ ID NO: 472299 - DNA, 25 bp, Artificial
  probe
  misc_feature (1)..(25): SEQ ID NO: 7599; WAN024GH3; Start 81; Stop 105
taaaataaaacttctcagtcgcttt

SEQ ID NO: 472300 - DNA, 25 bp, Artificial
  probe
  misc_feature (1)..(25): SEQ ID NO: 7599; WAN024GH3; Start 16; Stop 40
ttgttggacttcatcagagtcaaac

SEQ ID NO: 472301 - DNA, 25 bp, Artificial
  probe
  misc_feature (1)..(25): SEQ ID NO: 7599; WAN024GH3; Start 80; Stop 104
ataaaataaaacttctcagtcgctt

SEQ ID NO: 472302 - DNA, 25 bp, Artificial
  probe
  misc_feature (1)..(25): SEQ ID NO: 7599; WAN024GH3; Start 79; Stop 103
aataaaataaaacttctcagtcgct

SEQ ID NO: 472303 - DNA, 25 bp, Artificial
  probe
  misc_feature (1)..(25): SEQ ID NO: 7599; WAN024GH3; Start 28; Stop 52
atcagagtcaaacaggctgaaattc

SEQ ID NO: 472304 - DNA, 25 bp, Artificial
  probe
  misc_feature (1)..(25): SEQ ID NO: 7599; WAN024GH3; Start 27; Stop 51
catcagagtcaaacaggctgaaatt

SEQ ID NO: 472305 - DNA, 25 bp, Artificial
  probe
  misc_feature (1)..(25): SEQ ID NO: 7599; WAN024GH3; Start 18; Stop 42
gttggacttcatcagagtcaaacag

SEQ ID NO: 472306 - DNA, 25 bp, Artificial
  probe
  misc_feature (1)..(25): SEQ ID NO: 7599; WAN024GH3; Start 45; Stop 69
tgaaattccggccaataagaccaat

SEQ ID NO: 472307 - DNA, 25 bp, Artificial
  probe
  misc_feature (1)..(25): SEQ ID NO: 7599; WAN024GH3; Start 86; Stop 110
taaaacttctcagtcgctttctgct

SEQ ID NO: 472308 - DNA, 25 bp, Artificial
  probe
  misc_feature (1)..(25): SEQ ID NO: 7599; WAN024GH3; Start 30; Stop 54
cagagtcaaacaggctgaaattccg

SEQ ID NO: 472309 - DNA, 25 bp, Artificial
  probe
  misc_feature (1)..(25): SEQ ID NO: 7600; WAN024BSZ; Start 26; Stop 50
agcaatttgacaaatctagcaacaa

SEQ ID NO: 472310 - DNA, 25 bp, Artificial
  probe
  misc_feature (1)..(25): SEQ ID NO: 7600; WAN024BSZ; Start 25; Stop 49
aagcaatttgacaaatctagcaaca

SEQ ID NO: 472311 - DNA, 25 bp, Artificial
  probe
  misc_feature (1)..(25): SEQ ID NO: 7600; WAN024BSZ; Start 24; Stop 48
taagcaatttgacaaatctagcaac

SEQ ID NO: 472312 - DNA, 25 bp, Artificial
  probe
  misc_feature (1)..(25): SEQ ID NO: 7600; WAN024BSZ; Start 23; Stop 47
ttaagcaatttgacaaatctagcaa

SEQ ID NO: 472313 - DNA, 25 bp, Artificial
  probe
  misc_feature (1)..(25): SEQ ID NO: 7600; WAN024BSZ; Start 22; Stop 46
tttaagcaatttgacaaatctagca

SEQ ID NO: 472314 - DNA, 25 bp, Artificial
  probe
  misc_feature (1)..(25): SEQ ID NO: 7600; WAN024BSZ; Start 27; Stop 51
gcaatttgacaaatctagcaacaaa

SEQ ID NO: 472315 - DNA, 25 bp, Artificial
  probe
  misc_feature (1)..(25): SEQ ID NO: 7600; WAN024BSZ; Start 21; Stop 45
ttttaagcaatttgacaaatctagc

SEQ ID NO: 472316 - DNA, 25 bp, Artificial
  probe
  misc_feature (1)..(25): SEQ ID NO: 7600; WAN024BSZ; Start 28; Stop 52
caatttgacaaatctagcaacaaaa

SEQ ID NO: 472317 - DNA, 25 bp, Artificial
  probe
  misc_feature (1)..(25): SEQ ID NO: 7601; WAN024BXD; Start 8; Stop 32
atattgccatgtgtaaaattgccat

SEQ ID NO: 472318 - DNA, 25 bp, Artificial
  probe
  misc_feature (1)..(25): SEQ ID NO: 7601; WAN024BXD; Start 7; Stop 31
aatattgccatgtgtaaaattgcca

SEQ ID NO: 472319 - DNA, 25 bp, Artificial
  probe
  misc_feature (1)..(25): SEQ ID NO: 7601; WAN024BXD; Start 6; Stop 30
aaatattgccatgtgtaaaattgcc

SEQ ID NO: 472320 - DNA, 25 bp, Artificial
  probe
  misc_feature (1)..(25): SEQ ID NO: 7601; WAN024BXD; Start 52; Stop 76
aaaattgccatgtgtaaaattgccc

SEQ ID NO: 472321 - DNA, 25 bp, Artificial
  probe
  misc_feature (1)..(25): SEQ ID NO: 7601; WAN024BXD; Start 5; Stop 29
aaaatattgccatgtgtaaaattgc

SEQ ID NO: 472322 - DNA, 25 bp, Artificial
  probe
  misc_feature (1)..(25): SEQ ID NO: 7601; WAN024BXD; Start 53; Stop 77
aaattgccatgtgtaaaattgccct

SEQ ID NO: 472323 - DNA, 25 bp, Artificial
  probe
  misc_feature (1)..(25): SEQ ID NO: 7601; WAN024BXD; Start 3; Stop 27
ggaaaatattgccatgtgtaaaatt

SEQ ID NO: 472324 - DNA, 25 bp, Artificial
  probe
  misc_feature (1)..(25): SEQ ID NO: 7601; WAN024BXD; Start 1; Stop 25
ttggaaaatattgccatgtgtaaaa

SEQ ID NO: 472325 - DNA, 25 bp, Artificial
  probe
  misc_feature (1)..(25): SEQ ID NO: 7601; WAN024BXD; Start 54; Stop 78
aattgccatgtgtaaaattgccctc

SEQ ID NO: 472326 - DNA, 25 bp, Artificial
  probe
  misc_feature (1)..(25): SEQ ID NO: 7601; WAN024BXD; Start 2; Stop 26
tggaaaatattgccatgtgtaaaat

SEQ ID NO: 472327 - DNA, 25 bp, Artificial
  probe
  misc_feature (1)..(25): SEQ ID NO: 7601; WAN024BXD; Start 9; Stop 33
tattgccatgtgtaaaattgccatg

SEQ ID NO: 472328 - DNA, 25 bp, Artificial
  probe
  misc_feature (1)..(25): SEQ ID NO: 7601; WAN024BXD; Start 4; Stop 28
gaaaatattgccatgtgtaaaattg

SEQ ID NO: 472329 - DNA, 25 bp, Artificial
  probe
  misc_feature (1)..(25): SEQ ID NO: 7602; WAN024F92; Start 127; Stop 151
aatgaggctgattaccactatagaa

SEQ ID NO: 472330 - DNA, 25 bp, Artificial
  probe
  misc_feature (1)..(25): SEQ ID NO: 7602; WAN024F92; Start 2; Stop 26
tggaaaggacaagagtaatggatat

SEQ ID NO: 472331 - DNA, 25 bp, Artificial
  probe
  misc_feature (1)..(25): SEQ ID NO: 7602; WAN024F92; Start 1; Stop 25
ttggaaaggacaagagtaatggata

SEQ ID NO: 472332 - DNA, 25 bp, Artificial
  probe
  misc_feature (1)..(25): SEQ ID NO: 7602; WAN024F92; Start 29; Stop 53
atagaaacagactacgaacaggctt

SEQ ID NO: 472333 - DNA, 25 bp, Artificial
  probe
  misc_feature (1)..(25): SEQ ID NO: 7602; WAN024F92; Start 28; Stop 52
gatagaaacagactacgaacaggct

SEQ ID NO: 472334 - DNA, 25 bp, Artificial
  probe
  misc_feature (1)..(25): SEQ ID NO: 7602; WAN024F92; Start 30; Stop 54
tagaaacagactacgaacaggcttg

SEQ ID NO: 472335 - DNA, 25 bp, Artificial
  probe
  misc_feature (1)..(25): SEQ ID NO: 7602; WAN024F92; Start 137; Stop 161
attaccactatagaaaggaccctga

SEQ ID NO: 472336 - DNA, 25 bp, Artificial
  probe
  misc_feature (1)..(25): SEQ ID NO: 7602; WAN024F92; Start 136; Stop 160
gattaccactatagaaaggaccctg

SEQ ID NO: 472337 - DNA, 25 bp, Artificial
  probe
  misc_feature (1)..(25): SEQ ID NO: 7602; WAN024F92; Start 135; Stop 159
tgattaccactatagaaaggaccct

SEQ ID NO: 472338 - DNA, 25 bp, Artificial
  probe
  misc_feature (1)..(25): SEQ ID NO: 7602; WAN024F92; Start 134; Stop 158
ctgattaccactatagaaaggaccc

SEQ ID NO: 472339 - DNA, 25 bp, Artificial
  probe
  misc_feature (1)..(25): SEQ ID NO: 7602; WAN024F92; Start 130; Stop 154
gaggctgattaccactatagaaagg

SEQ ID NO: 472340 - DNA, 25 bp, Artificial
  probe
  misc_feature (1)..(25): SEQ ID NO: 7602; WAN024F92; Start 142; Stop 166
cactatagaaaggaccctgaactag

SEQ ID NO: 472341 - DNA, 25 bp, Artificial
  probe
  misc_feature (1)..(25): SEQ ID NO: 7602; WAN024F92; Start 138; Stop 162
ttaccactatagaaaggaccctgaa

SEQ ID NO: 472342 - DNA, 25 bp, Artificial
  probe
  misc_feature (1)..(25): SEQ ID NO: 7602; WAN024F92; Start 129; Stop 153
tgaggctgattaccactatagaaag

SEQ ID NO: 472343 - DNA, 25 bp, Artificial
  probe
  misc_feature (1)..(25): SEQ ID NO: 7602; WAN024F92; Start 133; Stop 157
gctgattaccactatagaaaggacc

SEQ ID NO: 472344 - DNA, 25 bp, Artificial
  probe
  misc_feature (1)..(25): SEQ ID NO: 7602; WAN024F92; Start 132; Stop 156
ggctgattaccactatagaaaggac

SEQ ID NO: 472345 - DNA, 25 bp, Artificial
  probe
  misc_feature (1)..(25): SEQ ID NO: 7602; WAN024F92; Start 131; Stop 155
aggctgattaccactatagaaagga

SEQ ID NO: 472346 - DNA, 25 bp, Artificial
  probe
  misc_feature (1)..(25): SEQ ID NO: 7602; WAN024F92; Start 141; Stop 165
ccactatagaaaggaccctgaacta

SEQ ID NO: 472347 - DNA, 25 bp, Artificial
  probe
  misc_feature (1)..(25): SEQ ID NO: 7602; WAN024F92; Start 139; Stop 163
taccactatagaaaggaccctgaac

SEQ ID NO: 472348 - DNA, 25 bp, Artificial
  probe
  misc_feature (1)..(25): SEQ ID NO: 7602; WAN024F92; Start 128; Stop 152
atgaggctgattaccactatagaaa

SEQ ID NO: 472349 - DNA, 25 bp, Artificial
  probe
  misc_feature (1)..(25): SEQ ID NO: 7602; WAN024F92; Start 126; Stop 150
aaatgaggctgattaccactataga

SEQ ID NO: 472350 - DNA, 25 bp, Artificial
  probe
  misc_feature (1)..(25): SEQ ID NO: 7602; WAN024F92; Start 5; Stop 29
aaaggacaagagtaatggatatcga

SEQ ID NO: 472351 - DNA, 25 bp, Artificial
  probe
  misc_feature (1)..(25): SEQ ID NO: 7602; WAN024F92; Start 4; Stop 28
gaaaggacaagagtaatggatatcg

SEQ ID NO: 472352 - DNA, 25 bp, Artificial
  probe
  misc_feature (1)..(25): SEQ ID NO: 7602; WAN024F92; Start 6; Stop 30
aaggacaagagtaatggatatcgat

SEQ ID NO: 472353 - DNA, 25 bp, Artificial
  probe
  misc_feature (1)..(25): SEQ ID NO: 7602; WAN024F92; Start 27; Stop 51
cgatagaaacagactacgaacaggc

SEQ ID NO: 472354 - DNA, 25 bp, Artificial
  probe
  misc_feature (1)..(25): SEQ ID NO: 7602; WAN024F92; Start 3; Stop 27
ggaaaggacaagagtaatggatatc

SEQ ID NO: 472355 - DNA, 25 bp, Artificial
  probe
  misc_feature (1)..(25): SEQ ID NO: 7602; WAN024F92; Start 143; Stop 167
actatagaaaggaccctgaactagg

SEQ ID NO: 472356 - DNA, 25 bp, Artificial
  probe
  misc_feature (1)..(25): SEQ ID NO: 7602; WAN024F92; Start 140; Stop 164
accactatagaaaggaccctgaact

SEQ ID NO: 472357 - DNA, 25 bp, Artificial
  probe
  misc_feature (1)..(25): SEQ ID NO: 7602; WAN024F92; Start 124; Stop 148
caaaatgaggctgattaccactata

SEQ ID NO: 472358 - DNA, 25 bp, Artificial
  probe
  misc_feature (1)..(25): SEQ ID NO: 7602; WAN024F92; Start 123; Stop 147
tcaaaatgaggctgattaccactat

SEQ ID NO: 472359 - DNA, 25 bp, Artificial
  probe
  misc_feature (1)..(25): SEQ ID NO: 7602; WAN024F92; Start 26; Stop 50
tcgatagaaacagactacgaacagg

SEQ ID NO: 472360 - DNA, 25 bp, Artificial
  probe
  misc_feature (1)..(25): SEQ ID NO: 7602; WAN024F92; Start 125; Stop 149
aaaatgaggctgattaccactatag

SEQ ID NO: 472361 - DNA, 25 bp, Artificial
  probe
  misc_feature (1)..(25): SEQ ID NO: 7602; WAN024F92; Start 106; Stop 130
aaccgtaactcaacagctcaaaatg

SEQ ID NO: 472362 - DNA, 25 bp, Artificial
  probe
  misc_feature (1)..(25): SEQ ID NO: 7603; WAN024FKF; Start 81; Stop 105
taagactacaatggaaccaagtacc

SEQ ID NO: 472363 - DNA, 25 bp, Artificial
  probe
  misc_feature (1)..(25): SEQ ID NO: 7603; WAN024FKF; Start 80; Stop 104
ataagactacaatggaaccaagtac

SEQ ID NO: 472364 - DNA, 25 bp, Artificial
  probe
  misc_feature (1)..(25): SEQ ID NO: 7603; WAN024FKF; Start 79; Stop 103
aataagactacaatggaaccaagta

SEQ ID NO: 472365 - DNA, 25 bp, Artificial
  probe
  misc_feature (1)..(25): SEQ ID NO: 7603; WAN024FKF; Start 82; Stop 106
aagactacaatggaaccaagtacca

SEQ ID NO: 472366 - DNA, 25 bp, Artificial
  probe
  misc_feature (1)..(25): SEQ ID NO: 7603; WAN024FKF; Start 53; Stop 77
gtagagaaagattccaatcaagact

SEQ ID NO: 472367 - DNA, 25 bp, Artificial
  probe
  misc_feature (1)..(25): SEQ ID NO: 7603; WAN024FKF; Start 52; Stop 76
agtagagaaagattccaatcaagac

SEQ ID NO: 472368 - DNA, 25 bp, Artificial
  probe
  misc_feature (1)..(25): SEQ ID NO: 7603; WAN024FKF; Start 96; Stop 120
accaagtaccataactaaactcaga

SEQ ID NO: 472369 - DNA, 25 bp, Artificial
  probe
  misc_feature (1)..(25): SEQ ID NO: 7603; WAN024FKF; Start 93; Stop 117
ggaaccaagtaccataactaaactc

SEQ ID NO: 472370 - DNA, 25 bp, Artificial
  probe
  misc_feature (1)..(25): SEQ ID NO: 7603; WAN024FKF; Start 78; Stop 102
aaataagactacaatggaaccaagt

SEQ ID NO: 472371 - DNA, 25 bp, Artificial
  probe
  misc_feature (1)..(25): SEQ ID NO: 7603; WAN024FKF; Start 95; Stop 119
aaccaagtaccataactaaactcag

SEQ ID NO: 472372 - DNA, 25 bp, Artificial
  probe
  misc_feature (1)..(25): SEQ ID NO: 7603; WAN024FKF; Start 94; Stop 118
gaaccaagtaccataactaaactca

SEQ ID NO: 472373 - DNA, 25 bp, Artificial
  probe
  misc_feature (1)..(25): SEQ ID NO: 7603; WAN024FKF; Start 9; Stop 33
gggcaagataataaacatcatacaa

SEQ ID NO: 472374 - DNA, 25 bp, Artificial
  probe
  misc_feature (1)..(25): SEQ ID NO: 7603; WAN024FKF; Start 75; Stop 99
actaaataagactacaatggaacca

SEQ ID NO: 472375 - DNA, 25 bp, Artificial
  probe
  misc_feature (1)..(25): SEQ ID NO: 7603; WAN024FKF; Start 97; Stop 121
ccaagtaccataactaaactcagaa

SEQ ID NO: 472376 - DNA, 25 bp, Artificial
  probe
  misc_feature (1)..(25): SEQ ID NO: 7603; WAN024FKF; Start 19; Stop 43
ataaacatcatacaaggaagagtga

SEQ ID NO: 472377 - DNA, 25 bp, Artificial
  probe
  misc_feature (1)..(25): SEQ ID NO: 7603; WAN024FKF; Start 116; Stop 140
tcagaataatatttgggaaagtcgt

SEQ ID NO: 472378 - DNA, 25 bp, Artificial
  probe
  misc_feature (1)..(25): SEQ ID NO: 7603; WAN024FKF; Start 55; Stop 79
agagaaagattccaatcaagactaa

SEQ ID NO: 472379 - DNA, 25 bp, Artificial
  probe
  misc_feature (1)..(25): SEQ ID NO: 7603; WAN024FKF; Start 51; Stop 75
aagtagagaaagattccaatcaaga

SEQ ID NO: 472380 - DNA, 25 bp, Artificial
  probe
  misc_feature (1)..(25): SEQ ID NO: 7603; WAN024FKF; Start 74; Stop 98
gactaaataagactacaatggaacc

SEQ ID NO: 472381 - DNA, 25 bp, Artificial
  probe
  misc_feature (1)..(25): SEQ ID NO: 7603; WAN024FKF; Start 92; Stop 116
tggaaccaagtaccataactaaact

SEQ ID NO: 472382 - DNA, 25 bp, Artificial
  probe
  misc_feature (1)..(25): SEQ ID NO: 7603; WAN024FKF; Start 18; Stop 42
aataaacatcatacaaggaagagtg

SEQ ID NO: 472383 - DNA, 25 bp, Artificial
  probe
  misc_feature (1)..(25): SEQ ID NO: 7603; WAN024FKF; Start 115; Stop 139
ctcagaataatatttgggaaagtcg

SEQ ID NO: 472384 - DNA, 25 bp, Artificial
  probe
  misc_feature (1)..(25): SEQ ID NO: 7603; WAN024FKF; Start 26; Stop 50
tcatacaaggaagagtgatgaataa

SEQ ID NO: 472385 - DNA, 25 bp, Artificial
  probe
  misc_feature (1)..(25): SEQ ID NO: 7603; WAN024FKF; Start 202; Stop 226
tggctcttatcaaagaaggatttct

SEQ ID NO: 472386 - DNA, 25 bp, Artificial
  probe
  misc_feature (1)..(25): SEQ ID NO: 7603; WAN024FKF; Start 203; Stop 227
ggctcttatcaaagaaggatttctc

SEQ ID NO: 472387 - DNA, 25 bp, Artificial
  probe
  misc_feature (1)..(25): SEQ ID NO: 7603; WAN024FKF; Start 201; Stop 225
ttggctcttatcaaagaaggatttc

SEQ ID NO: 472388 - DNA, 25 bp, Artificial
  probe
  misc_feature (1)..(25): SEQ ID NO: 7603; WAN024FKF; Start 27; Stop 51
catacaaggaagagtgatgaataaa

SEQ ID NO: 472389 - DNA, 25 bp, Artificial
  probe
  misc_feature (1)..(25): SEQ ID NO: 7603; WAN024FKF; Start 25; Stop 49
atcatacaaggaagagtgatgaata

SEQ ID NO: 472390 - DNA, 25 bp, Artificial
  probe
  misc_feature (1)..(25): SEQ ID NO: 7603; WAN024FKF; Start 56; Stop 80
gagaaagattccaatcaagactaaa

SEQ ID NO: 472391 - DNA, 25 bp, Artificial
  probe
  misc_feature (1)..(25): SEQ ID NO: 7603; WAN024FKF; Start 50; Stop 74
aaagtagagaaagattccaatcaag

SEQ ID NO: 472392 - DNA, 25 bp, Artificial
  probe
  misc_feature (1)..(25): SEQ ID NO: 7603; WAN024FKF; Start 2; Stop 26
tggaaaggggcaagataataaacat

SEQ ID NO: 472393 - DNA, 25 bp, Artificial
  probe
  misc_feature (1)..(25): SEQ ID NO: 7603; WAN024FKF; Start 3; Stop 27
ggaaaggggcaagataataaacatc

SEQ ID NO: 472394 - DNA, 25 bp, Artificial
  probe
  misc_feature (1)..(25): SEQ ID NO: 7603; WAN024FKF; Start 77; Stop 101
taaataagactacaatggaaccaag

SEQ ID NO: 472395 - DNA, 25 bp, Artificial
  probe
  misc_feature (1)..(25): SEQ ID NO: 7604; WAN024BH2; Start 194; Stop 218
agatggttgagttatctgttctaca

SEQ ID NO: 472396 - DNA, 25 bp, Artificial
  probe
  misc_feature (1)..(25): SEQ ID NO: 7604; WAN024BH2; Start 193; Stop 217
aagatggttgagttatctgttctac

SEQ ID NO: 472397 - DNA, 25 bp, Artificial
  probe
  misc_feature (1)..(25): SEQ ID NO: 7604; WAN024BH2; Start 190; Stop 214
ccaaagatggttgagttatctgttc

SEQ ID NO: 472398 - DNA, 25 bp, Artificial
  probe
  misc_feature (1)..(25): SEQ ID NO: 7604; WAN024BH2; Start 187; Stop 211
atcccaaagatggttgagttatctg

SEQ ID NO: 472399 - DNA, 25 bp, Artificial
  probe
  misc_feature (1)..(25): SEQ ID NO: 7604; WAN024BH2; Start 189; Stop 213
cccaaagatggttgagttatctgtt

SEQ ID NO: 472400 - DNA, 25 bp, Artificial
  probe
  misc_feature (1)..(25): SEQ ID NO: 7604; WAN024BH2; Start 186; Stop 210
gatcccaaagatggttgagttatct

SEQ ID NO: 472401 - DNA, 25 bp, Artificial
  probe
  misc_feature (1)..(25): SEQ ID NO: 7604; WAN024BH2; Start 191; Stop 215
caaagatggttgagttatctgttct

SEQ ID NO: 472402 - DNA, 25 bp, Artificial
  probe
  misc_feature (1)..(25): SEQ ID NO: 7604; WAN024BH2; Start 185; Stop 209
cgatcccaaagatggttgagttatc

SEQ ID NO: 472403 - DNA, 25 bp, Artificial
  probe
  misc_feature (1)..(25): SEQ ID NO: 7604; WAN024BH2; Start 188; Stop 212
tcccaaagatggttgagttatctgt

SEQ ID NO: 472404 - DNA, 25 bp, Artificial
  probe
  misc_feature (1)..(25): SEQ ID NO: 7604; WAN024BH2; Start 192; Stop 216
aaagatggttgagttatctgttcta

SEQ ID NO: 472405 - DNA, 25 bp, Artificial
  probe
  misc_feature (1)..(25): SEQ ID NO: 7604; WAN024BH2; Start 184; Stop 208
tcgatcccaaagatggttgagttat

SEQ ID NO: 472406 - DNA, 25 bp, Artificial
  probe
  misc_feature (1)..(25): SEQ ID NO: 7604; WAN024BH2; Start 195; Stop 219
gatggttgagttatctgttctacag

SEQ ID NO: 472407 - DNA, 25 bp, Artificial
  probe
  misc_feature (1)..(25): SEQ ID NO: 7604; WAN024BH2; Start 161; Stop 185
ttaaatttactgaggatgggtggtc

SEQ ID NO: 472408 - DNA, 25 bp, Artificial
  probe
  misc_feature (1)..(25): SEQ ID NO: 7604; WAN024BH2; Start 160; Stop 184
gttaaatttactgaggatgggtggt

SEQ ID NO: 472409 - DNA, 25 bp, Artificial
  probe
  misc_feature (1)..(25): SEQ ID NO: 7604; WAN024BH2; Start 159; Stop 183
agttaaatttactgaggatgggtgg

SEQ ID NO: 472410 - DNA, 25 bp, Artificial
  probe
  misc_feature (1)..(25): SEQ ID NO: 7604; WAN024BH2; Start 158; Stop 182
aagttaaatttactgaggatgggtg

SEQ ID NO: 472411 - DNA, 25 bp, Artificial
  probe
  misc_feature (1)..(25): SEQ ID NO: 7604; WAN024BH2; Start 157; Stop 181
caagttaaatttactgaggatgggt

SEQ ID NO: 472412 - DNA, 25 bp, Artificial
  probe
  misc_feature (1)..(25): SEQ ID NO: 7604; WAN024BH2; Start 183; Stop 207
gtcgatcccaaagatggttgagtta

SEQ ID NO: 472413 - DNA, 25 bp, Artificial
  probe
  misc_feature (1)..(25): SEQ ID NO: 7604; WAN024BH2; Start 156; Stop 180
tcaagttaaatttactgaggatggg

SEQ ID NO: 472414 - DNA, 25 bp, Artificial
  probe
  misc_feature (1)..(25): SEQ ID NO: 7604; WAN024BH2; Start 146; Stop 170
cgagaccagatcaagttaaatttac

SEQ ID NO: 472415 - DNA, 25 bp, Artificial
  probe
  misc_feature (1)..(25): SEQ ID NO: 7604; WAN024BH2; Start 164; Stop 188
aatttactgaggatgggtggtcgat

SEQ ID NO: 472416 - DNA, 25 bp, Artificial
  probe
  misc_feature (1)..(25): SEQ ID NO: 7604; WAN024BH2; Start 162; Stop 186
taaatttactgaggatgggtggtcg

SEQ ID NO: 472417 - DNA, 25 bp, Artificial
  probe
  misc_feature (1)..(25): SEQ ID NO: 7604; WAN024BH2; Start 163; Stop 187
aaatttactgaggatgggtggtcga

SEQ ID NO: 472418 - DNA, 25 bp, Artificial
  probe
  misc_feature (1)..(25): SEQ ID NO: 7604; WAN024BH2; Start 165; Stop 189
atttactgaggatgggtggtcgatc

SEQ ID NO: 472419 - DNA, 25 bp, Artificial
  probe
  misc_feature (1)..(25): SEQ ID NO: 7604; WAN024BH2; Start 151; Stop 175
ccagatcaagttaaatttactgagg

SEQ ID NO: 472420 - DNA, 25 bp, Artificial
  probe
  misc_feature (1)..(25): SEQ ID NO: 7604; WAN024BH2; Start 55; Stop 79
tttaaaatgccccacttgctagttg

SEQ ID NO: 472421 - DNA, 25 bp, Artificial
  probe
  misc_feature (1)..(25): SEQ ID NO: 7604; WAN024BH2; Start 155; Stop 179
atcaagttaaatttactgaggatgg

SEQ ID NO: 472422 - DNA, 25 bp, Artificial
  probe
  misc_feature (1)..(25): SEQ ID NO: 7604; WAN024BH2; Start 149; Stop 173
gaccagatcaagttaaatttactga

SEQ ID NO: 472423 - DNA, 25 bp, Artificial
  probe
  misc_feature (1)..(25): SEQ ID NO: 7604; WAN024BH2; Start 147; Stop 171
gagaccagatcaagttaaatttact

SEQ ID NO: 472424 - DNA, 25 bp, Artificial
  probe
  misc_feature (1)..(25): SEQ ID NO: 7604; WAN024BH2; Start 150; Stop 174
accagatcaagttaaatttactgag

SEQ ID NO: 472425 - DNA, 25 bp, Artificial
  probe
  misc_feature (1)..(25): SEQ ID NO: 7604; WAN024BH2; Start 148; Stop 172
agaccagatcaagttaaatttactg

SEQ ID NO: 472426 - DNA, 25 bp, Artificial
  probe
  misc_feature (1)..(25): SEQ ID NO: 7604; WAN024BH2; Start 152; Stop 176
cagatcaagttaaatttactgagga

SEQ ID NO: 472427 - DNA, 25 bp, Artificial
  probe
  misc_feature (1)..(25): SEQ ID NO: 7604; WAN024BH2; Start 154; Stop 178
gatcaagttaaatttactgaggatg

SEQ ID NO: 472428 - DNA, 25 bp, Artificial
  probe
  misc_feature (1)..(25): SEQ ID NO: 7605; WAN024BUZ; Start 18; Stop 42
ttgtaagtaccttgaacctcctgac

SEQ ID NO: 472429 - DNA, 25 bp, Artificial
  probe
  misc_feature (1)..(25): SEQ ID NO: 7605; WAN024BUZ; Start 95; Stop 119
agatttatgttgaaactccgcattt

SEQ ID NO: 472430 - DNA, 25 bp, Artificial
  probe
  misc_feature (1)..(25): SEQ ID NO: 7605; WAN024BUZ; Start 94; Stop 118
cagatttatgttgaaactccgcatt

SEQ ID NO: 472431 - DNA, 25 bp, Artificial
  probe
  misc_feature (1)..(25): SEQ ID NO: 7605; WAN024BUZ; Start 90; Stop 114
aatccagatttatgttgaaactccg

SEQ ID NO: 472432 - DNA, 25 bp, Artificial
  probe
  misc_feature (1)..(25): SEQ ID NO: 7605; WAN024BUZ; Start 20; Stop 44
gtaagtaccttgaacctcctgacac

SEQ ID NO: 472433 - DNA, 25 bp, Artificial
  probe
  misc_feature (1)..(25): SEQ ID NO: 7605; WAN024BUZ; Start 1; Stop 25
ttggaactcttgggtatttgtaagt

SEQ ID NO: 472434 - DNA, 25 bp, Artificial
  probe
  misc_feature (1)..(25): SEQ ID NO: 7605; WAN024BUZ; Start 2; Stop 26
tggaactcttgggtatttgtaagta

SEQ ID NO: 472435 - DNA, 25 bp, Artificial
  probe
  misc_feature (1)..(25): SEQ ID NO: 7605; WAN024BUZ; Start 91; Stop 115
atccagatttatgttgaaactccgc

SEQ ID NO: 472436 - DNA, 25 bp, Artificial
  probe
  misc_feature (1)..(25): SEQ ID NO: 7605; WAN024BUZ; Start 16; Stop 40
atttgtaagtaccttgaacctcctg

SEQ ID NO: 472437 - DNA, 25 bp, Artificial
  probe
  misc_feature (1)..(25): SEQ ID NO: 7605; WAN024BUZ; Start 88; Stop 112
gcaatccagatttatgttgaaactc

SEQ ID NO: 472438 - DNA, 25 bp, Artificial
  probe
  misc_feature (1)..(25): SEQ ID NO: 7605; WAN024BUZ; Start 15; Stop 39
tatttgtaagtaccttgaacctcct

SEQ ID NO: 472439 - DNA, 25 bp, Artificial
  probe
  misc_feature (1)..(25): SEQ ID NO: 7605; WAN024BUZ; Start 14; Stop 38
gtatttgtaagtaccttgaacctcc

SEQ ID NO: 472440 - DNA, 25 bp, Artificial
  probe
  misc_feature (1)..(25): SEQ ID NO: 7605; WAN024BUZ; Start 93; Stop 117
ccagatttatgttgaaactccgcat

SEQ ID NO: 472441 - DNA, 25 bp, Artificial
  probe
  misc_feature (1)..(25): SEQ ID NO: 7605; WAN024BUZ; Start 17; Stop 41
tttgtaagtaccttgaacctcctga

SEQ ID NO: 472442 - DNA, 25 bp, Artificial
  probe
  misc_feature (1)..(25): SEQ ID NO: 7605; WAN024BUZ; Start 3; Stop 27
ggaactcttgggtatttgtaagtac

SEQ ID NO: 472443 - DNA, 25 bp, Artificial
  probe
  misc_feature (1)..(25): SEQ ID NO: 7605; WAN024BUZ; Start 89; Stop 113
caatccagatttatgttgaaactcc

SEQ ID NO: 472444 - DNA, 25 bp, Artificial
  probe
  misc_feature (1)..(25): SEQ ID NO: 7605; WAN024BUZ; Start 19; Stop 43
tgtaagtaccttgaacctcctgaca

SEQ ID NO: 472445 - DNA, 25 bp, Artificial
  probe
  misc_feature (1)..(25): SEQ ID NO: 7605; WAN024BUZ; Start 21; Stop 45
taagtaccttgaacctcctgacacc

SEQ ID NO: 472446 - DNA, 25 bp, Artificial
  probe
  misc_feature (1)..(25): SEQ ID NO: 7605; WAN024BUZ; Start 92; Stop 116
tccagatttatgttgaaactccgca

SEQ ID NO: 472447 - DNA, 25 bp, Artificial
  probe
  misc_feature (1)..(25): SEQ ID NO: 7605; WAN024BUZ; Start 25; Stop 49
taccttgaacctcctgacaccattc

SEQ ID NO: 472448 - DNA, 25 bp, Artificial
  probe
  misc_feature (1)..(25): SEQ ID NO: 7605; WAN024BUZ; Start 87; Stop 111
tgcaatccagatttatgttgaaact

SEQ ID NO: 472449 - DNA, 25 bp, Artificial
  probe
  misc_feature (1)..(25): SEQ ID NO: 7605; WAN024BUZ; Start 24; Stop 48
gtaccttgaacctcctgacaccatt

SEQ ID NO: 472450 - DNA, 25 bp, Artificial
  probe
  misc_feature (1)..(25): SEQ ID NO: 7605; WAN024BUZ; Start 96; Stop 120
gatttatgttgaaactccgcatttt

SEQ ID NO: 472451 - DNA, 25 bp, Artificial
  probe
  misc_feature (1)..(25): SEQ ID NO: 7605; WAN024BUZ; Start 120; Stop 144
ttctggatgctatcatcaattattg

SEQ ID NO: 472452 - DNA, 25 bp, Artificial
  probe
  misc_feature (1)..(25): SEQ ID NO: 7605; WAN024BUZ; Start 121; Stop 145
tctggatgctatcatcaattattga

SEQ ID NO: 472453 - DNA, 25 bp, Artificial
  probe
  misc_feature (1)..(25): SEQ ID NO: 7605; WAN024BUZ; Start 45; Stop 69
cattcacaacagtgataagctgatt

SEQ ID NO: 472454 - DNA, 25 bp, Artificial
  probe
  misc_feature (1)..(25): SEQ ID NO: 7605; WAN024BUZ; Start 39; Stop 63
tgacaccattcacaacagtgataag

SEQ ID NO: 472455 - DNA, 25 bp, Artificial
  probe
  misc_feature (1)..(25): SEQ ID NO: 7605; WAN024BUZ; Start 38; Stop 62
ctgacaccattcacaacagtgataa

SEQ ID NO: 472456 - DNA, 25 bp, Artificial
  probe
  misc_feature (1)..(25): SEQ ID NO: 7605; WAN024BUZ; Start 12; Stop 36
gggtatttgtaagtaccttgaacct

SEQ ID NO: 472457 - DNA, 25 bp, Artificial
  probe
  misc_feature (1)..(25): SEQ ID NO: 7605; WAN024BUZ; Start 11; Stop 35
tgggtatttgtaagtaccttgaacc

SEQ ID NO: 472458 - DNA, 25 bp, Artificial
  probe
  misc_feature (1)..(25): SEQ ID NO: 7605; WAN024BUZ; Start 8; Stop 32
tcttgggtatttgtaagtaccttga

SEQ ID NO: 472459 - DNA, 25 bp, Artificial
  probe
  misc_feature (1)..(25): SEQ ID NO: 7605; WAN024BUZ; Start 6; Stop 30
actcttgggtatttgtaagtacctt

SEQ ID NO: 472460 - DNA, 25 bp, Artificial
  probe
  misc_feature (1)..(25): SEQ ID NO: 7605; WAN024BUZ; Start 5; Stop 29
aactcttgggtatttgtaagtacct

SEQ ID NO: 472461 - DNA, 25 bp, Artificial
  probe
  misc_feature (1)..(25): SEQ ID NO: 7606; WAN024BKB; Start 33; Stop 57
tatccccgtcctcttttcttctata

SEQ ID NO: 472462 - DNA, 25 bp, Artificial
  probe
  misc_feature (1)..(25): SEQ ID NO: 7606; WAN024BKB; Start 34; Stop 58
atccccgtcctcttttcttctatat

SEQ ID NO: 472463 - DNA, 25 bp, Artificial
  probe
  misc_feature (1)..(25): SEQ ID NO: 7606; WAN024BKB; Start 32; Stop 56
atatccccgtcctcttttcttctat

SEQ ID NO: 472464 - DNA, 25 bp, Artificial
  probe
  misc_feature (1)..(25): SEQ ID NO: 7606; WAN024BKB; Start 14; Stop 38
aatattcgtttgttcttcatatccc

SEQ ID NO: 472465 - DNA, 25 bp, Artificial
  probe
  misc_feature (1)..(25): SEQ ID NO: 7606; WAN024BKB; Start 16; Stop 40
tattcgtttgttcttcatatccccg

SEQ ID NO: 472466 - DNA, 25 bp, Artificial
  probe
  misc_feature (1)..(25): SEQ ID NO: 7606; WAN024BKB; Start 31; Stop 55
catatccccgtcctcttttcttcta

SEQ ID NO: 472467 - DNA, 25 bp, Artificial
  probe
  misc_feature (1)..(25): SEQ ID NO: 7606; WAN024BKB; Start 15; Stop 39
atattcgtttgttcttcatatcccc

SEQ ID NO: 472468 - DNA, 25 bp, Artificial
  probe
  misc_feature (1)..(25): SEQ ID NO: 7606; WAN024BKB; Start 35; Stop 59
tccccgtcctcttttcttctatata

SEQ ID NO: 472469 - DNA, 25 bp, Artificial
  probe
  misc_feature (1)..(25): SEQ ID NO: 7606; WAN024BKB; Start 36; Stop 60
ccccgtcctcttttcttctatatat

SEQ ID NO: 472470 - DNA, 25 bp, Artificial
  probe
  misc_feature (1)..(25): SEQ ID NO: 7606; WAN024BKB; Start 2; Stop 26
tggaagtctttaaatattcgtttgt

SEQ ID NO: 472471 - DNA, 25 bp, Artificial
  probe
  misc_feature (1)..(25): SEQ ID NO: 7606; WAN024BKB; Start 29; Stop 53
ttcatatccccgtcctcttttcttc

SEQ ID NO: 472472 - DNA, 25 bp, Artificial
  probe
  misc_feature (1)..(25): SEQ ID NO: 7606; WAN024BKB; Start 28; Stop 52
cttcatatccccgtcctcttttctt

SEQ ID NO: 472473 - DNA, 25 bp, Artificial
  probe
  misc_feature (1)..(25): SEQ ID NO: 7606; WAN024BKB; Start 26; Stop 50
ttcttcatatccccgtcctcttttc

SEQ ID NO: 472474 - DNA, 25 bp, Artificial
  probe
  misc_feature (1)..(25): SEQ ID NO: 7606; WAN024BKB; Start 85; Stop 109
agcaattcaagaaagaaaaggaaaa

SEQ ID NO: 472475 - DNA, 25 bp, Artificial
  probe
  misc_feature (1)..(25): SEQ ID NO: 7606; WAN024BKB; Start 25; Stop 49
gttcttcatatccccgtcctctttt

SEQ ID NO: 472476 - DNA, 25 bp, Artificial
  probe
  misc_feature (1)..(25): SEQ ID NO: 7606; WAN024BKB; Start 17; Stop 41
attcgtttgttcttcatatccccgt

SEQ ID NO: 472477 - DNA, 25 bp, Artificial
  probe
  misc_feature (1)..(25): SEQ ID NO: 7606; WAN024BKB; Start 84; Stop 108
tagcaattcaagaaagaaaaggaaa

SEQ ID NO: 472478 - DNA, 25 bp, Artificial
  probe
  misc_feature (1)..(25): SEQ ID NO: 7606; WAN024BKB; Start 30; Stop 54
tcatatccccgtcctcttttcttct

SEQ ID NO: 472479 - DNA, 25 bp, Artificial
  probe
  misc_feature (1)..(25): SEQ ID NO: 7606; WAN024BKB; Start 27; Stop 51
tcttcatatccccgtcctcttttct

SEQ ID NO: 472480 - DNA, 25 bp, Artificial
  probe
  misc_feature (1)..(25): SEQ ID NO: 7606; WAN024BKB; Start 83; Stop 107
atagcaattcaagaaagaaaaggaa

SEQ ID NO: 472481 - DNA, 25 bp, Artificial
  probe
  misc_feature (1)..(25): SEQ ID NO: 7606; WAN024BKB; Start 82; Stop 106
aatagcaattcaagaaagaaaagga

SEQ ID NO: 472482 - DNA, 25 bp, Artificial
  probe
  misc_feature (1)..(25): SEQ ID NO: 7606; WAN024BKB; Start 3; Stop 27
ggaagtctttaaatattcgtttgtt

SEQ ID NO: 472483 - DNA, 25 bp, Artificial
  probe
  misc_feature (1)..(25): SEQ ID NO: 7606; WAN024BKB; Start 1; Stop 25
ttggaagtctttaaatattcgtttg

SEQ ID NO: 472484 - DNA, 25 bp, Artificial
  probe
  misc_feature (1)..(25): SEQ ID NO: 7606; WAN024BKB; Start 21; Stop 45
gtttgttcttcatatccccgtcctc

SEQ ID NO: 472485 - DNA, 25 bp, Artificial
  probe
  misc_feature (1)..(25): SEQ ID NO: 7606; WAN024BKB; Start 18; Stop 42
ttcgtttgttcttcatatccccgtc

SEQ ID NO: 472486 - DNA, 25 bp, Artificial
  probe
  misc_feature (1)..(25): SEQ ID NO: 7606; WAN024BKB; Start 13; Stop 37
aaatattcgtttgttcttcatatcc

SEQ ID NO: 472487 - DNA, 25 bp, Artificial
  probe
  misc_feature (1)..(25): SEQ ID NO: 7606; WAN024BKB; Start 24; Stop 48
tgttcttcatatccccgtcctcttt

SEQ ID NO: 472488 - DNA, 25 bp, Artificial
  probe
  misc_feature (1)..(25): SEQ ID NO: 7606; WAN024BKB; Start 23; Stop 47
ttgttcttcatatccccgtcctctt

SEQ ID NO: 472489 - DNA, 25 bp, Artificial
  probe
  misc_feature (1)..(25): SEQ ID NO: 7606; WAN024BKB; Start 22; Stop 46
tttgttcttcatatccccgtcctct

SEQ ID NO: 472490 - DNA, 25 bp, Artificial
  probe
  misc_feature (1)..(25): SEQ ID NO: 7606; WAN024BKB; Start 8; Stop 32
tctttaaatattcgtttgttcttca

SEQ ID NO: 472491 - DNA, 25 bp, Artificial
  probe
  misc_feature (1)..(25): SEQ ID NO: 7606; WAN024BKB; Start 6; Stop 30
agtctttaaatattcgtttgttctt

SEQ ID NO: 472492 - DNA, 25 bp, Artificial
  probe
  misc_feature (1)..(25): SEQ ID NO: 7606; WAN024BKB; Start 5; Stop 29
aagtctttaaatattcgtttgttct

SEQ ID NO: 472493 - DNA, 25 bp, Artificial
  probe
  misc_feature (1)..(25): SEQ ID NO: 7606; WAN024BKB; Start 7; Stop 31
gtctttaaatattcgtttgttcttc

SEQ ID NO: 472494 - DNA, 25 bp, Artificial
  probe
  misc_feature (1)..(25): SEQ ID NO: 7607; WAN024FHN; Start 80; Stop 104
gttgtaatgtcaatcgttaccactt

SEQ ID NO: 472495 - DNA, 25 bp, Artificial
  probe
  misc_feature (1)..(25): SEQ ID NO: 7607; WAN024FHN; Start 79; Stop 103
agttgtaatgtcaatcgttaccact

SEQ ID NO: 472496 - DNA, 25 bp, Artificial
  probe
  misc_feature (1)..(25): SEQ ID NO: 7607; WAN024FHN; Start 78; Stop 102
tagttgtaatgtcaatcgttaccac

SEQ ID NO: 472497 - DNA, 25 bp, Artificial
  probe
  misc_feature (1)..(25): SEQ ID NO: 7607; WAN024FHN; Start 163; Stop 187
attcctgatgatgagtatggtggat

SEQ ID NO: 472498 - DNA, 25 bp, Artificial
  probe
  misc_feature (1)..(25): SEQ ID NO: 7607; WAN024FHN; Start 162; Stop 186
aattcctgatgatgagtatggtgga

SEQ ID NO: 472499 - DNA, 25 bp, Artificial
  probe
  misc_feature (1)..(25): SEQ ID NO: 7607; WAN024FHN; Start 77; Stop 101
ttagttgtaatgtcaatcgttacca

SEQ ID NO: 472500 - DNA, 25 bp, Artificial
  probe
  misc_feature (1)..(25): SEQ ID NO: 7607; WAN024FHN; Start 161; Stop 185
aaattcctgatgatgagtatggtgg

SEQ ID NO: 472501 - DNA, 25 bp, Artificial
  probe
  misc_feature (1)..(25): SEQ ID NO: 7607; WAN024FHN; Start 164; Stop 188
ttcctgatgatgagtatggtggatc

SEQ ID NO: 472502 - DNA, 25 bp, Artificial
  probe
  misc_feature (1)..(25): SEQ ID NO: 7607; WAN024FHN; Start 81; Stop 105
ttgtaatgtcaatcgttaccacttt

SEQ ID NO: 472503 - DNA, 25 bp, Artificial
  probe
  misc_feature (1)..(25): SEQ ID NO: 7607; WAN024FHN; Start 85; Stop 109
aatgtcaatcgttaccacttttcaa

SEQ ID NO: 472504 - DNA, 25 bp, Artificial
  probe
  misc_feature (1)..(25): SEQ ID NO: 7607; WAN024FHN; Start 76; Stop 100
tttagttgtaatgtcaatcgttacc

SEQ ID NO: 472505 - DNA, 25 bp, Artificial
  probe
  misc_feature (1)..(25): SEQ ID NO: 7607; WAN024FHN; Start 84; Stop 108
taatgtcaatcgttaccacttttca

SEQ ID NO: 472506 - DNA, 25 bp, Artificial
  probe
  misc_feature (1)..(25): SEQ ID NO: 7607; WAN024FHN; Start 86; Stop 110
atgtcaatcgttaccacttttcaac

SEQ ID NO: 472507 - DNA, 25 bp, Artificial
  probe
  misc_feature (1)..(25): SEQ ID NO: 7607; WAN024FHN; Start 160; Stop 184
aaaattcctgatgatgagtatggtg

SEQ ID NO: 472508 - DNA, 25 bp, Artificial
  probe
  misc_feature (1)..(25): SEQ ID NO: 7607; WAN024FHN; Start 89; Stop 113
tcaatcgttaccacttttcaaccag

SEQ ID NO: 472509 - DNA, 25 bp, Artificial
  probe
  misc_feature (1)..(25): SEQ ID NO: 7607; WAN024FHN; Start 132; Stop 156
caaccctctttctgagccaattctc

SEQ ID NO: 472510 - DNA, 25 bp, Artificial
  probe
  misc_feature (1)..(25): SEQ ID NO: 7607; WAN024FHN; Start 88; Stop 112
gtcaatcgttaccacttttcaacca

SEQ ID NO: 472511 - DNA, 25 bp, Artificial
  probe
  misc_feature (1)..(25): SEQ ID NO: 7607; WAN024FHN; Start 87; Stop 111
tgtcaatcgttaccacttttcaacc

SEQ ID NO: 472512 - DNA, 25 bp, Artificial
  probe
  misc_feature (1)..(25): SEQ ID NO: 7607; WAN024FHN; Start 133; Stop 157
aaccctctttctgagccaattctct

SEQ ID NO: 472513 - DNA, 25 bp, Artificial
  probe
  misc_feature (1)..(25): SEQ ID NO: 7607; WAN024FHN; Start 91; Stop 115
aatcgttaccacttttcaaccagtc

SEQ ID NO: 472514 - DNA, 25 bp, Artificial
  probe
  misc_feature (1)..(25): SEQ ID NO: 7607; WAN024FHN; Start 100; Stop 124
cacttttcaaccagtcgtctaactc

SEQ ID NO: 472515 - DNA, 25 bp, Artificial
  probe
  misc_feature (1)..(25): SEQ ID NO: 7607; WAN024FHN; Start 97; Stop 121
taccacttttcaaccagtcgtctaa

SEQ ID NO: 472516 - DNA, 25 bp, Artificial
  probe
  misc_feature (1)..(25): SEQ ID NO: 7607; WAN024FHN; Start 96; Stop 120
ttaccacttttcaaccagtcgtcta

SEQ ID NO: 472517 - DNA, 25 bp, Artificial
  probe
  misc_feature (1)..(25): SEQ ID NO: 7607; WAN024FHN; Start 90; Stop 114
caatcgttaccacttttcaaccagt

SEQ ID NO: 472518 - DNA, 25 bp, Artificial
  probe
  misc_feature (1)..(25): SEQ ID NO: 7607; WAN024FHN; Start 82; Stop 106
tgtaatgtcaatcgttaccactttt

SEQ ID NO: 472519 - DNA, 25 bp, Artificial
  probe
  misc_feature (1)..(25): SEQ ID NO: 7607; WAN024FHN; Start 2; Stop 26
tggaatttgcatcctcttctccttt

SEQ ID NO: 472520 - DNA, 25 bp, Artificial
  probe
  misc_feature (1)..(25): SEQ ID NO: 7607; WAN024FHN; Start 1; Stop 25
ttggaatttgcatcctcttctcctt

SEQ ID NO: 472521 - DNA, 25 bp, Artificial
  probe
  misc_feature (1)..(25): SEQ ID NO: 7607; WAN024FHN; Start 83; Stop 107
gtaatgtcaatcgttaccacttttc

SEQ ID NO: 472522 - DNA, 25 bp, Artificial
  probe
  misc_feature (1)..(25): SEQ ID NO: 7607; WAN024FHN; Start 134; Stop 158
accctctttctgagccaattctctc

SEQ ID NO: 472523 - DNA, 25 bp, Artificial
  probe
  misc_feature (1)..(25): SEQ ID NO: 7607; WAN024FHN; Start 137; Stop 161
ctctttctgagccaattctctcaaa

SEQ ID NO: 472524 - DNA, 25 bp, Artificial
  probe
  misc_feature (1)..(25): SEQ ID NO: 7607; WAN024FHN; Start 101; Stop 125
acttttcaaccagtcgtctaactcc

SEQ ID NO: 472525 - DNA, 25 bp, Artificial
  probe
  misc_feature (1)..(25): SEQ ID NO: 7607; WAN024FHN; Start 99; Stop 123
ccacttttcaaccagtcgtctaact

SEQ ID NO: 472526 - DNA, 25 bp, Artificial
  probe
  misc_feature (1)..(25): SEQ ID NO: 7607; WAN024FHN; Start 98; Stop 122
accacttttcaaccagtcgtctaac

SEQ ID NO: 472527 - DNA, 25 bp, Artificial
  probe
  misc_feature (1)..(25): SEQ ID NO: 7608; WAN024G44; Start 25; Stop 49
gcttcttcattgctagtgttattgt

SEQ ID NO: 472528 - DNA, 25 bp, Artificial
  probe
  misc_feature (1)..(25): SEQ ID NO: 7608; WAN024G44; Start 24; Stop 48
tgcttcttcattgctagtgttattg

SEQ ID NO: 472529 - DNA, 25 bp, Artificial
  probe
  misc_feature (1)..(25): SEQ ID NO: 7608; WAN024G44; Start 23; Stop 47
ttgcttcttcattgctagtgttatt

SEQ ID NO: 472530 - DNA, 25 bp, Artificial
  probe
  misc_feature (1)..(25): SEQ ID NO: 7608; WAN024G44; Start 27; Stop 51
ttcttcattgctagtgttattgtct

SEQ ID NO: 472531 - DNA, 25 bp, Artificial
  probe
  misc_feature (1)..(25): SEQ ID NO: 7608; WAN024G44; Start 26; Stop 50
cttcttcattgctagtgttattgtc

SEQ ID NO: 472532 - DNA, 25 bp, Artificial
  probe
  misc_feature (1)..(25): SEQ ID NO: 7608; WAN024G44; Start 36; Stop 60
gctagtgttattgtctatcacagga

SEQ ID NO: 472533 - DNA, 25 bp, Artificial
  probe
  misc_feature (1)..(25): SEQ ID NO: 7608; WAN024G44; Start 35; Stop 59
tgctagtgttattgtctatcacagg

SEQ ID NO: 472534 - DNA, 25 bp, Artificial
  probe
  misc_feature (1)..(25): SEQ ID NO: 7608; WAN024G44; Start 31; Stop 55
tcattgctagtgttattgtctatca

SEQ ID NO: 472535 - DNA, 25 bp, Artificial
  probe
  misc_feature (1)..(25): SEQ ID NO: 7608; WAN024G44; Start 28; Stop 52
tcttcattgctagtgttattgtcta

SEQ ID NO: 472536 - DNA, 25 bp, Artificial
  probe
  misc_feature (1)..(25): SEQ ID NO: 7608; WAN024G44; Start 34; Stop 58
ttgctagtgttattgtctatcacag

SEQ ID NO: 472537 - DNA, 25 bp, Artificial
  probe
  misc_feature (1)..(25): SEQ ID NO: 7608; WAN024G44; Start 33; Stop 57
attgctagtgttattgtctatcaca

SEQ ID NO: 472538 - DNA, 25 bp, Artificial
  probe
  misc_feature (1)..(25): SEQ ID NO: 7608; WAN024G44; Start 32; Stop 56
cattgctagtgttattgtctatcac

SEQ ID NO: 472539 - DNA, 25 bp, Artificial
  probe
  misc_feature (1)..(25): SEQ ID NO: 7608; WAN024G44; Start 22; Stop 46
tttgcttcttcattgctagtgttat

SEQ ID NO: 472540 - DNA, 25 bp, Artificial
  probe
  misc_feature (1)..(25): SEQ ID NO: 7608; WAN024G44; Start 30; Stop 54
ttcattgctagtgttattgtctatc

SEQ ID NO: 472541 - DNA, 25 bp, Artificial
  probe
  misc_feature (1)..(25): SEQ ID NO: 7608; WAN024G44; Start 29; Stop 53
cttcattgctagtgttattgtctat

SEQ ID NO: 472542 - DNA, 25 bp, Artificial
  probe
  misc_feature (1)..(25): SEQ ID NO: 7608; WAN024G44; Start 37; Stop 61
ctagtgttattgtctatcacaggat

SEQ ID NO: 472543 - DNA, 25 bp, Artificial
  probe
  misc_feature (1)..(25): SEQ ID NO: 7608; WAN024G44; Start 38; Stop 62
tagtgttattgtctatcacaggatt

SEQ ID NO: 472544 - DNA, 25 bp, Artificial
  probe
  misc_feature (1)..(25): SEQ ID NO: 7608; WAN024G44; Start 115; Stop 139
tcctgtgaagtttccatagcactat

SEQ ID NO: 472545 - DNA, 25 bp, Artificial
  probe
  misc_feature (1)..(25): SEQ ID NO: 7608; WAN024G44; Start 114; Stop 138
atcctgtgaagtttccatagcacta

SEQ ID NO: 472546 - DNA, 25 bp, Artificial
  probe
  misc_feature (1)..(25): SEQ ID NO: 7608; WAN024G44; Start 112; Stop 136
aaatcctgtgaagtttccatagcac

SEQ ID NO: 472547 - DNA, 25 bp, Artificial
  probe
  misc_feature (1)..(25): SEQ ID NO: 7608; WAN024G44; Start 113; Stop 137
aatcctgtgaagtttccatagcact

SEQ ID NO: 472548 - DNA, 25 bp, Artificial
  probe
  misc_feature (1)..(25): SEQ ID NO: 7608; WAN024G44; Start 39; Stop 63
agtgttattgtctatcacaggattt

SEQ ID NO: 472549 - DNA, 25 bp, Artificial
  probe
  misc_feature (1)..(25): SEQ ID NO: 7608; WAN024G44; Start 217; Stop 241
gtgtctgctaagactacctcattag

SEQ ID NO: 472550 - DNA, 25 bp, Artificial
  probe
  misc_feature (1)..(25): SEQ ID NO: 7608; WAN024G44; Start 116; Stop 140
cctgtgaagtttccatagcactatg

SEQ ID NO: 472551 - DNA, 25 bp, Artificial
  probe
  misc_feature (1)..(25): SEQ ID NO: 7608; WAN024G44; Start 216; Stop 240
tgtgtctgctaagactacctcatta

SEQ ID NO: 472552 - DNA, 25 bp, Artificial
  probe
  misc_feature (1)..(25): SEQ ID NO: 7608; WAN024G44; Start 211; Stop 235
ctagatgtgtctgctaagactacct

SEQ ID NO: 472553 - DNA, 25 bp, Artificial
  probe
  misc_feature (1)..(25): SEQ ID NO: 7608; WAN024G44; Start 83; Stop 107
ccttaatgactgctgttttcttctc

SEQ ID NO: 472554 - DNA, 25 bp, Artificial
  probe
  misc_feature (1)..(25): SEQ ID NO: 7608; WAN024G44; Start 212; Stop 236
tagatgtgtctgctaagactacctc

SEQ ID NO: 472555 - DNA, 25 bp, Artificial
  probe
  misc_feature (1)..(25): SEQ ID NO: 7608; WAN024G44; Start 82; Stop 106
tccttaatgactgctgttttcttct

SEQ ID NO: 472556 - DNA, 25 bp, Artificial
  probe
  misc_feature (1)..(25): SEQ ID NO: 7608; WAN024G44; Start 81; Stop 105
ttccttaatgactgctgttttcttc

SEQ ID NO: 472557 - DNA, 25 bp, Artificial
  probe
  misc_feature (1)..(25): SEQ ID NO: 7608; WAN024G44; Start 110; Stop 134
taaaatcctgtgaagtttccatagc

SEQ ID NO: 472558 - DNA, 25 bp, Artificial
  probe
  misc_feature (1)..(25): SEQ ID NO: 7608; WAN024G44; Start 218; Stop 242
tgtctgctaagactacctcattagg

SEQ ID NO: 472559 - DNA, 25 bp, Artificial
  probe
  misc_feature (1)..(25): SEQ ID NO: 7608; WAN024G44; Start 84; Stop 108
cttaatgactgctgttttcttctct

SEQ ID NO: 472560 - DNA, 25 bp, Artificial
  probe
  misc_feature (1)..(25): SEQ ID NO: 7609; WAN024ESZ; Start 18; Stop 42
tcataatcagcagttcttccagttc

SEQ ID NO: 472561 - DNA, 25 bp, Artificial
  probe
  misc_feature (1)..(25): SEQ ID NO: 7609; WAN024ESZ; Start 17; Stop 41
ctcataatcagcagttcttccagtt

SEQ ID NO: 472562 - DNA, 25 bp, Artificial
  probe
  misc_feature (1)..(25): SEQ ID NO: 7609; WAN024ESZ; Start 3; Stop 27
ggacaccaacatcactcataatcag

SEQ ID NO: 472563 - DNA, 25 bp, Artificial
  probe
  misc_feature (1)..(25): SEQ ID NO: 7609; WAN024ESZ; Start 12; Stop 36
catcactcataatcagcagttcttc

SEQ ID NO: 472564 - DNA, 25 bp, Artificial
  probe
  misc_feature (1)..(25): SEQ ID NO: 7609; WAN024ESZ; Start 11; Stop 35
acatcactcataatcagcagttctt

SEQ ID NO: 472565 - DNA, 25 bp, Artificial
  probe
  misc_feature (1)..(25): SEQ ID NO: 7609; WAN024ESZ; Start 10; Stop 34
aacatcactcataatcagcagttct

SEQ ID NO: 472566 - DNA, 25 bp, Artificial
  probe
  misc_feature (1)..(25): SEQ ID NO: 7609; WAN024ESZ; Start 9; Stop 33
caacatcactcataatcagcagttc

SEQ ID NO: 472567 - DNA, 25 bp, Artificial
  probe
  misc_feature (1)..(25): SEQ ID NO: 7609; WAN024ESZ; Start 19; Stop 43
cataatcagcagttcttccagttcc

SEQ ID NO: 472568 - DNA, 25 bp, Artificial
  probe
  misc_feature (1)..(25): SEQ ID NO: 7609; WAN024ESZ; Start 13; Stop 37
atcactcataatcagcagttcttcc

SEQ ID NO: 472569 - DNA, 25 bp, Artificial
  probe
  misc_feature (1)..(25): SEQ ID NO: 7609; WAN024ESZ; Start 20; Stop 44
ataatcagcagttcttccagttcct

SEQ ID NO: 472570 - DNA, 25 bp, Artificial
  probe
  misc_feature (1)..(25): SEQ ID NO: 7609; WAN024ESZ; Start 6; Stop 30
caccaacatcactcataatcagcag

SEQ ID NO: 472571 - DNA, 25 bp, Artificial
  probe
  misc_feature (1)..(25): SEQ ID NO: 7609; WAN024ESZ; Start 8; Stop 32
ccaacatcactcataatcagcagtt

SEQ ID NO: 472572 - DNA, 25 bp, Artificial
  probe
  misc_feature (1)..(25): SEQ ID NO: 7609; WAN024ESZ; Start 4; Stop 28
gacaccaacatcactcataatcagc

SEQ ID NO: 472573 - DNA, 25 bp, Artificial
  probe
  misc_feature (1)..(25): SEQ ID NO: 7609; WAN024ESZ; Start 15; Stop 39
cactcataatcagcagttcttccag

SEQ ID NO: 472574 - DNA, 25 bp, Artificial
  probe
  misc_feature (1)..(25): SEQ ID NO: 7609; WAN024ESZ; Start 174; Stop 198
ctggttcaagcacttcagaattatt

SEQ ID NO: 472575 - DNA, 25 bp, Artificial
  probe
  misc_feature (1)..(25): SEQ ID NO: 7609; WAN024ESZ; Start 21; Stop 45
taatcagcagttcttccagttcctc

SEQ ID NO: 472576 - DNA, 25 bp, Artificial
  probe
  misc_feature (1)..(25): SEQ ID NO: 7609; WAN024ESZ; Start 16; Stop 40
actcataatcagcagttcttccagt

SEQ ID NO: 472577 - DNA, 25 bp, Artificial
  probe
  misc_feature (1)..(25): SEQ ID NO: 7609; WAN024ESZ; Start 14; Stop 38
tcactcataatcagcagttcttcca

SEQ ID NO: 472578 - DNA, 25 bp, Artificial
  probe
  misc_feature (1)..(25): SEQ ID NO: 7609; WAN024ESZ; Start 5; Stop 29
acaccaacatcactcataatcagca

SEQ ID NO: 472579 - DNA, 25 bp, Artificial
  probe
  misc_feature (1)..(25): SEQ ID NO: 7609; WAN024ESZ; Start 7; Stop 31
accaacatcactcataatcagcagt

SEQ ID NO: 472580 - DNA, 25 bp, Artificial
  probe
  misc_feature (1)..(25): SEQ ID NO: 7609; WAN024ESZ; Start 70; Stop 94
gaagttagcaaagaaggcattcaag

SEQ ID NO: 472581 - DNA, 25 bp, Artificial
  probe
  misc_feature (1)..(25): SEQ ID NO: 7609; WAN024ESZ; Start 175; Stop 199
tggttcaagcacttcagaattattt

SEQ ID NO: 472582 - DNA, 25 bp, Artificial
  probe
  misc_feature (1)..(25): SEQ ID NO: 7609; WAN024ESZ; Start 2; Stop 26
tggacaccaacatcactcataatca

SEQ ID NO: 472583 - DNA, 25 bp, Artificial
  probe
  misc_feature (1)..(25): SEQ ID NO: 7609; WAN024ESZ; Start 201; Stop 225
cttctacagttccttcgtgctcaag

SEQ ID NO: 472584 - DNA, 25 bp, Artificial
  probe
  misc_feature (1)..(25): SEQ ID NO: 7609; WAN024ESZ; Start 69; Stop 93
ggaagttagcaaagaaggcattcaa

SEQ ID NO: 472585 - DNA, 25 bp, Artificial
  probe
  misc_feature (1)..(25): SEQ ID NO: 7609; WAN024ESZ; Start 200; Stop 224
tcttctacagttccttcgtgctcaa

SEQ ID NO: 472586 - DNA, 25 bp, Artificial
  probe
  misc_feature (1)..(25): SEQ ID NO: 7609; WAN024ESZ; Start 199; Stop 223
ttcttctacagttccttcgtgctca

SEQ ID NO: 472587 - DNA, 25 bp, Artificial
  probe
  misc_feature (1)..(25): SEQ ID NO: 7609; WAN024ESZ; Start 71; Stop 95
aagttagcaaagaaggcattcaagc

SEQ ID NO: 472588 - DNA, 25 bp, Artificial
  probe
  misc_feature (1)..(25): SEQ ID NO: 7609; WAN024ESZ; Start 198; Stop 222
tttcttctacagttccttcgtgctc

SEQ ID NO: 472589 - DNA, 25 bp, Artificial
  probe
  misc_feature (1)..(25): SEQ ID NO: 7609; WAN024ESZ; Start 152; Stop 176
gtttcttctgtttgaggagcttctg

SEQ ID NO: 472590 - DNA, 25 bp, Artificial
  probe
  misc_feature (1)..(25): SEQ ID NO: 7609; WAN024ESZ; Start 151; Stop 175
agtttcttctgtttgaggagcttct

SEQ ID NO: 472591 - DNA, 25 bp, Artificial
  probe
  misc_feature (1)..(25): SEQ ID NO: 7609; WAN024ESZ; Start 173; Stop 197
tctggttcaagcacttcagaattat

SEQ ID NO: 472592 - DNA, 25 bp, Artificial
  probe
  misc_feature (1)..(25): SEQ ID NO: 7609; WAN024ESZ; Start 195; Stop 219
tattttcttctacagttccttcgtg

SEQ ID NO: 472593 - DNA, 25 bp, Artificial
  probe
  misc_feature (1)..(25): SEQ ID NO: 7610; WAN024BUD; Start 58; Stop 82
aaagcaacgacagggattactcatc

SEQ ID NO: 472594 - DNA, 25 bp, Artificial
  probe
  misc_feature (1)..(25): SEQ ID NO: 7610; WAN024BUD; Start 18; Stop 42
tttgctagtcaaggcggatcttatc

SEQ ID NO: 472595 - DNA, 25 bp, Artificial
  probe
  misc_feature (1)..(25): SEQ ID NO: 7610; WAN024BUD; Start 8; Stop 32
aatcttttcttttgctagtcaaggc

SEQ ID NO: 472596 - DNA, 25 bp, Artificial
  probe
  misc_feature (1)..(25): SEQ ID NO: 7610; WAN024BUD; Start 5; Stop 29
accaatcttttcttttgctagtcaa

SEQ ID NO: 472597 - DNA, 25 bp, Artificial
  probe
  misc_feature (1)..(25): SEQ ID NO: 7610; WAN024BUD; Start 2; Stop 26
tggaccaatcttttcttttgctagt

SEQ ID NO: 472598 - DNA, 25 bp, Artificial
  probe
  misc_feature (1)..(25): SEQ ID NO: 7610; WAN024BUD; Start 7; Stop 31
caatcttttcttttgctagtcaagg

SEQ ID NO: 472599 - DNA, 25 bp, Artificial
  probe
  misc_feature (1)..(25): SEQ ID NO: 7610; WAN024BUD; Start 6; Stop 30
ccaatcttttcttttgctagtcaag

SEQ ID NO: 472600 - DNA, 25 bp, Artificial
  probe
  misc_feature (1)..(25): SEQ ID NO: 7610; WAN024BUD; Start 4; Stop 28
gaccaatcttttcttttgctagtca

SEQ ID NO: 472601 - DNA, 25 bp, Artificial
  probe
  misc_feature (1)..(25): SEQ ID NO: 7610; WAN024BUD; Start 3; Stop 27
ggaccaatcttttcttttgctagtc

SEQ ID NO: 472602 - DNA, 25 bp, Artificial
  probe
  misc_feature (1)..(25): SEQ ID NO: 7610; WAN024BUD; Start 1; Stop 25
ttggaccaatcttttcttttgctag

SEQ ID NO: 472603 - DNA, 25 bp, Artificial
  probe
  misc_feature (1)..(25): SEQ ID NO: 7610; WAN024BUD; Start 57; Stop 81
aaaagcaacgacagggattactcat

SEQ ID NO: 472604 - DNA, 25 bp, Artificial
  probe
  misc_feature (1)..(25): SEQ ID NO: 7610; WAN024BUD; Start 9; Stop 33
atcttttcttttgctagtcaaggcg

SEQ ID NO: 472605 - DNA, 25 bp, Artificial
  probe
  misc_feature (1)..(25): SEQ ID NO: 7610; WAN024BUD; Start 17; Stop 41
ttttgctagtcaaggcggatcttat

SEQ ID NO: 472606 - DNA, 25 bp, Artificial
  probe
  misc_feature (1)..(25): SEQ ID NO: 7610; WAN024BUD; Start 16; Stop 40
cttttgctagtcaaggcggatctta

SEQ ID NO: 472607 - DNA, 25 bp, Artificial
  probe
  misc_feature (1)..(25): SEQ ID NO: 7610; WAN024BUD; Start 12; Stop 36
ttttcttttgctagtcaaggcggat

SEQ ID NO: 472608 - DNA, 25 bp, Artificial
  probe
  misc_feature (1)..(25): SEQ ID NO: 7610; WAN024BUD; Start 19; Stop 43
ttgctagtcaaggcggatcttatcc

SEQ ID NO: 472609 - DNA, 25 bp, Artificial
  probe
  misc_feature (1)..(25): SEQ ID NO: 7610; WAN024BUD; Start 13; Stop 37
tttcttttgctagtcaaggcggatc

SEQ ID NO: 472610 - DNA, 25 bp, Artificial
  probe
  misc_feature (1)..(25): SEQ ID NO: 7610; WAN024BUD; Start 11; Stop 35
cttttcttttgctagtcaaggcgga

SEQ ID NO: 472611 - DNA, 25 bp, Artificial
  probe
  misc_feature (1)..(25): SEQ ID NO: 7610; WAN024BUD; Start 10; Stop 34
tcttttcttttgctagtcaaggcgg

SEQ ID NO: 472612 - DNA, 25 bp, Artificial
  probe
  misc_feature (1)..(25): SEQ ID NO: 7610; WAN024BUD; Start 15; Stop 39
tcttttgctagtcaaggcggatctt

SEQ ID NO: 472613 - DNA, 25 bp, Artificial
  probe
  misc_feature (1)..(25): SEQ ID NO: 7610; WAN024BUD; Start 14; Stop 38
ttcttttgctagtcaaggcggatct

SEQ ID NO: 472614 - DNA, 25 bp, Artificial
  probe
  misc_feature (1)..(25): SEQ ID NO: 7610; WAN024BUD; Start 59; Stop 83
aagcaacgacagggattactcatcg

SEQ ID NO: 472615 - DNA, 25 bp, Artificial
  probe
  misc_feature (1)..(25): SEQ ID NO: 7611; WAN024ERO; Start 50; Stop 74
aagaaaagatgggcaagaaatggat

SEQ ID NO: 472616 - DNA, 25 bp, Artificial
  probe
  misc_feature (1)..(25): SEQ ID NO: 7611; WAN024ERO; Start 26; Stop 50
tgtcaaatattactatagatgggca

SEQ ID NO: 472617 - DNA, 25 bp, Artificial
  probe
  misc_feature (1)..(25): SEQ ID NO: 7611; WAN024ERO; Start 49; Stop 73
caagaaaagatgggcaagaaatgga

SEQ ID NO: 472618 - DNA, 25 bp, Artificial
  probe
  misc_feature (1)..(25): SEQ ID NO: 7611; WAN024ERO; Start 51; Stop 75
agaaaagatgggcaagaaatggatc

SEQ ID NO: 472619 - DNA, 25 bp, Artificial
  probe
  misc_feature (1)..(25): SEQ ID NO: 7611; WAN024ERO; Start 39; Stop 63
tatagatgggcaagaaaagatgggc

SEQ ID NO: 472620 - DNA, 25 bp, Artificial
  probe
  misc_feature (1)..(25): SEQ ID NO: 7611; WAN024ERO; Start 37; Stop 61
actatagatgggcaagaaaagatgg

SEQ ID NO: 472621 - DNA, 25 bp, Artificial
  probe
  misc_feature (1)..(25): SEQ ID NO: 7611; WAN024ERO; Start 38; Stop 62
ctatagatgggcaagaaaagatggg

SEQ ID NO: 472622 - DNA, 25 bp, Artificial
  probe
  misc_feature (1)..(25): SEQ ID NO: 7611; WAN024ERO; Start 27; Stop 51
gtcaaatattactatagatgggcaa

SEQ ID NO: 472623 - DNA, 25 bp, Artificial
  probe
  misc_feature (1)..(25): SEQ ID NO: 7611; WAN024ERO; Start 25; Stop 49
atgtcaaatattactatagatgggc

SEQ ID NO: 472624 - DNA, 25 bp, Artificial
  probe
  misc_feature (1)..(25): SEQ ID NO: 7611; WAN024ERO; Start 36; Stop 60
tactatagatgggcaagaaaagatg

SEQ ID NO: 472625 - DNA, 25 bp, Artificial
  probe
  misc_feature (1)..(25): SEQ ID NO: 7611; WAN024ERO; Start 29; Stop 53
caaatattactatagatgggcaaga

SEQ ID NO: 472626 - DNA, 25 bp, Artificial
  probe
  misc_feature (1)..(25): SEQ ID NO: 7611; WAN024ERO; Start 28; Stop 52
tcaaatattactatagatgggcaag

SEQ ID NO: 472627 - DNA, 25 bp, Artificial
  probe
  misc_feature (1)..(25): SEQ ID NO: 7611; WAN024ERO; Start 48; Stop 72
gcaagaaaagatgggcaagaaatgg

SEQ ID NO: 472628 - DNA, 25 bp, Artificial
  probe
  misc_feature (1)..(25): SEQ ID NO: 7611; WAN024ERO; Start 47; Stop 71
ggcaagaaaagatgggcaagaaatg

SEQ ID NO: 472629 - DNA, 25 bp, Artificial
  probe
  misc_feature (1)..(25): SEQ ID NO: 7611; WAN024ERO; Start 15; Stop 39
tgggatgaacatgtcaaatattact

SEQ ID NO: 472630 - DNA, 25 bp, Artificial
  probe
  misc_feature (1)..(25): SEQ ID NO: 7611; WAN024ERO; Start 35; Stop 59
ttactatagatgggcaagaaaagat

SEQ ID NO: 472631 - DNA, 25 bp, Artificial
  probe
  misc_feature (1)..(25): SEQ ID NO: 7611; WAN024ERO; Start 34; Stop 58
attactatagatgggcaagaaaaga

SEQ ID NO: 472632 - DNA, 25 bp, Artificial
  probe
  misc_feature (1)..(25): SEQ ID NO: 7611; WAN024ERO; Start 14; Stop 38
ttgggatgaacatgtcaaatattac

SEQ ID NO: 472633 - DNA, 25 bp, Artificial
  probe
  misc_feature (1)..(25): SEQ ID NO: 7611; WAN024ERO; Start 31; Stop 55
aatattactatagatgggcaagaaa

SEQ ID NO: 472634 - DNA, 25 bp, Artificial
  probe
  misc_feature (1)..(25): SEQ ID NO: 7611; WAN024ERO; Start 30; Stop 54
aaatattactatagatgggcaagaa

SEQ ID NO: 472635 - DNA, 25 bp, Artificial
  probe
  misc_feature (1)..(25): SEQ ID NO: 7611; WAN024ERO; Start 46; Stop 70
gggcaagaaaagatgggcaagaaat

SEQ ID NO: 472636 - DNA, 25 bp, Artificial
  probe
  misc_feature (1)..(25): SEQ ID NO: 7611; WAN024ERO; Start 40; Stop 64
atagatgggcaagaaaagatgggca

SEQ ID NO: 472637 - DNA, 25 bp, Artificial
  probe
  misc_feature (1)..(25): SEQ ID NO: 7611; WAN024ERO; Start 16; Stop 40
gggatgaacatgtcaaatattacta

SEQ ID NO: 472638 - DNA, 25 bp, Artificial
  probe
  misc_feature (1)..(25): SEQ ID NO: 7611; WAN024ERO; Start 41; Stop 65
tagatgggcaagaaaagatgggcaa

SEQ ID NO: 472639 - DNA, 25 bp, Artificial
  probe
  misc_feature (1)..(25): SEQ ID NO: 7611; WAN024ERO; Start 33; Stop 57
tattactatagatgggcaagaaaag

SEQ ID NO: 472640 - DNA, 25 bp, Artificial
  probe
  misc_feature (1)..(25): SEQ ID NO: 7611; WAN024ERO; Start 13; Stop 37
tttgggatgaacatgtcaaatatta

SEQ ID NO: 472641 - DNA, 25 bp, Artificial
  probe
  misc_feature (1)..(25): SEQ ID NO: 7611; WAN024ERO; Start 10; Stop 34
ccttttgggatgaacatgtcaaata

SEQ ID NO: 472642 - DNA, 25 bp, Artificial
  probe
  misc_feature (1)..(25): SEQ ID NO: 7611; WAN024ERO; Start 32; Stop 56
atattactatagatgggcaagaaaa

SEQ ID NO: 472643 - DNA, 25 bp, Artificial
  probe
  misc_feature (1)..(25): SEQ ID NO: 7611; WAN024ERO; Start 9; Stop 33
tccttttgggatgaacatgtcaaat

SEQ ID NO: 472644 - DNA, 25 bp, Artificial
  probe
  misc_feature (1)..(25): SEQ ID NO: 7611; WAN024ERO; Start 7; Stop 31
agtccttttgggatgaacatgtcaa

SEQ ID NO: 472645 - DNA, 25 bp, Artificial
  probe
  misc_feature (1)..(25): SEQ ID NO: 7611; WAN024ERO; Start 11; Stop 35
cttttgggatgaacatgtcaaatat

SEQ ID NO: 472646 - DNA, 25 bp, Artificial
  probe
  misc_feature (1)..(25): SEQ ID NO: 7611; WAN024ERO; Start 8; Stop 32
gtccttttgggatgaacatgtcaaa

SEQ ID NO: 472647 - DNA, 25 bp, Artificial
  probe
  misc_feature (1)..(25): SEQ ID NO: 7611; WAN024ERO; Start 12; Stop 36
ttttgggatgaacatgtcaaatatt

SEQ ID NO: 472648 - DNA, 25 bp, Artificial
  probe
  misc_feature (1)..(25): SEQ ID NO: 7611; WAN024ERO; Start 17; Stop 41
ggatgaacatgtcaaatattactat

SEQ ID NO: 472649 - DNA, 25 bp, Artificial
  probe
  misc_feature (1)..(25): SEQ ID NO: 7612; WAN024DLB; Start 27; Stop 51
ttacagagagtccttcttgatagct

SEQ ID NO: 472650 - DNA, 25 bp, Artificial
  probe
  misc_feature (1)..(25): SEQ ID NO: 7612; WAN024DLB; Start 26; Stop 50
tttacagagagtccttcttgatagc

SEQ ID NO: 472651 - DNA, 25 bp, Artificial
  probe
  misc_feature (1)..(25): SEQ ID NO: 7612; WAN024DLB; Start 34; Stop 58
gagtccttcttgatagctaatcgtt

SEQ ID NO: 472652 - DNA, 25 bp, Artificial
  probe
  misc_feature (1)..(25): SEQ ID NO: 7612; WAN024DLB; Start 28; Stop 52
tacagagagtccttcttgatagcta

SEQ ID NO: 472653 - DNA, 25 bp, Artificial
  probe
  misc_feature (1)..(25): SEQ ID NO: 7612; WAN024DLB; Start 32; Stop 56
gagagtccttcttgatagctaatcg

SEQ ID NO: 472654 - DNA, 25 bp, Artificial
  probe
  misc_feature (1)..(25): SEQ ID NO: 7612; WAN024DLB; Start 29; Stop 53
acagagagtccttcttgatagctaa

SEQ ID NO: 472655 - DNA, 25 bp, Artificial
  probe
  misc_feature (1)..(25): SEQ ID NO: 7612; WAN024DLB; Start 30; Stop 54
cagagagtccttcttgatagctaat

SEQ ID NO: 472656 - DNA, 25 bp, Artificial
  probe
  misc_feature (1)..(25): SEQ ID NO: 7612; WAN024DLB; Start 33; Stop 57
agagtccttcttgatagctaatcgt

SEQ ID NO: 472657 - DNA, 25 bp, Artificial
  probe
  misc_feature (1)..(25): SEQ ID NO: 7612; WAN024DLB; Start 31; Stop 55
agagagtccttcttgatagctaatc

SEQ ID NO: 472658 - DNA, 25 bp, Artificial
  probe
  misc_feature (1)..(25): SEQ ID NO: 7612; WAN024DLB; Start 35; Stop 59
agtccttcttgatagctaatcgttt

SEQ ID NO: 472659 - DNA, 25 bp, Artificial
  probe
  misc_feature (1)..(25): SEQ ID NO: 7612; WAN024DLB; Start 23; Stop 47
gattttacagagagtccttcttgat

SEQ ID NO: 472660 - DNA, 25 bp, Artificial
  probe
  misc_feature (1)..(25): SEQ ID NO: 7612; WAN024DLB; Start 60; Stop 84
tttctactttcaagaggtcagtttt

SEQ ID NO: 472661 - DNA, 25 bp, Artificial
  probe
  misc_feature (1)..(25): SEQ ID NO: 7612; WAN024DLB; Start 59; Stop 83
ttttctactttcaagaggtcagttt

SEQ ID NO: 472662 - DNA, 25 bp, Artificial
  probe
  misc_feature (1)..(25): SEQ ID NO: 7612; WAN024DLB; Start 22; Stop 46
ggattttacagagagtccttcttga

SEQ ID NO: 472663 - DNA, 25 bp, Artificial
  probe
  misc_feature (1)..(25): SEQ ID NO: 7612; WAN024DLB; Start 25; Stop 49
ttttacagagagtccttcttgatag

SEQ ID NO: 472664 - DNA, 25 bp, Artificial
  probe
  misc_feature (1)..(25): SEQ ID NO: 7612; WAN024DLB; Start 14; Stop 38
tggcaaaaggattttacagagagtc

SEQ ID NO: 472665 - DNA, 25 bp, Artificial
  probe
  misc_feature (1)..(25): SEQ ID NO: 7612; WAN024DLB; Start 13; Stop 37
ctggcaaaaggattttacagagagt

SEQ ID NO: 472666 - DNA, 25 bp, Artificial
  probe
  misc_feature (1)..(25): SEQ ID NO: 7612; WAN024DLB; Start 8; Stop 32
aaatgctggcaaaaggattttacag

SEQ ID NO: 472667 - DNA, 25 bp, Artificial
  probe
  misc_feature (1)..(25): SEQ ID NO: 7612; WAN024DLB; Start 7; Stop 31
caaatgctggcaaaaggattttaca

SEQ ID NO: 472668 - DNA, 25 bp, Artificial
  probe
  misc_feature (1)..(25): SEQ ID NO: 7612; WAN024DLB; Start 24; Stop 48
attttacagagagtccttcttgata

SEQ ID NO: 472669 - DNA, 25 bp, Artificial
  probe
  misc_feature (1)..(25): SEQ ID NO: 7612; WAN024DLB; Start 15; Stop 39
ggcaaaaggattttacagagagtcc

SEQ ID NO: 472670 - DNA, 25 bp, Artificial
  probe
  misc_feature (1)..(25): SEQ ID NO: 7612; WAN024DLB; Start 9; Stop 33
aatgctggcaaaaggattttacaga

SEQ ID NO: 472671 - DNA, 25 bp, Artificial
  probe
  misc_feature (1)..(25): SEQ ID NO: 7612; WAN024DLB; Start 12; Stop 36
gctggcaaaaggattttacagagag

SEQ ID NO: 472672 - DNA, 25 bp, Artificial
  probe
  misc_feature (1)..(25): SEQ ID NO: 7612; WAN024DLB; Start 10; Stop 34
atgctggcaaaaggattttacagag

SEQ ID NO: 472673 - DNA, 25 bp, Artificial
  probe
  misc_feature (1)..(25): SEQ ID NO: 7612; WAN024DLB; Start 6; Stop 30
gcaaatgctggcaaaaggattttac

SEQ ID NO: 472674 - DNA, 25 bp, Artificial
  probe
  misc_feature (1)..(25): SEQ ID NO: 7612; WAN024DLB; Start 36; Stop 60
gtccttcttgatagctaatcgtttt

SEQ ID NO: 472675 - DNA, 25 bp, Artificial
  probe
  misc_feature (1)..(25): SEQ ID NO: 7612; WAN024DLB; Start 11; Stop 35
tgctggcaaaaggattttacagaga

SEQ ID NO: 472676 - DNA, 25 bp, Artificial
  probe
  misc_feature (1)..(25): SEQ ID NO: 7612; WAN024DLB; Start 5; Stop 29
agcaaatgctggcaaaaggatttta

SEQ ID NO: 472677 - DNA, 25 bp, Artificial
  probe
  misc_feature (1)..(25): SEQ ID NO: 7612; WAN024DLB; Start 21; Stop 45
aggattttacagagagtccttcttg

SEQ ID NO: 472678 - DNA, 25 bp, Artificial
  probe
  misc_feature (1)..(25): SEQ ID NO: 7612; WAN024DLB; Start 16; Stop 40
gcaaaaggattttacagagagtcct

SEQ ID NO: 472679 - DNA, 25 bp, Artificial
  probe
  misc_feature (1)..(25): SEQ ID NO: 7612; WAN024DLB; Start 4; Stop 28
gagcaaatgctggcaaaaggatttt

SEQ ID NO: 472680 - DNA, 25 bp, Artificial
  probe
  misc_feature (1)..(25): SEQ ID NO: 7612; WAN024DLB; Start 3; Stop 27
ggagcaaatgctggcaaaaggattt

SEQ ID NO: 472681 - DNA, 25 bp, Artificial
  probe
  misc_feature (1)..(25): SEQ ID NO: 7613; WAN024C2C; Start 1; Stop 25
ttggaggatacgatgaaagatagtt

SEQ ID NO: 472682 - DNA, 25 bp, Artificial
  probe
  misc_feature (1)..(25): SEQ ID NO: 7613; WAN024C2C; Start 2; Stop 26
tggaggatacgatgaaagatagtta

SEQ ID NO: 472683 - DNA, 25 bp, Artificial
  probe
  misc_feature (1)..(25): SEQ ID NO: 7613; WAN024C2C; Start 3; Stop 27
ggaggatacgatgaaagatagttat

SEQ ID NO: 472684 - DNA, 25 bp, Artificial
  probe
  misc_feature (1)..(25): SEQ ID NO: 7613; WAN024C2C; Start 6; Stop 30
ggatacgatgaaagatagttattgg

SEQ ID NO: 472685 - DNA, 25 bp, Artificial
  probe
  misc_feature (1)..(25): SEQ ID NO: 7613; WAN024C2C; Start 7; Stop 31
gatacgatgaaagatagttattggt

SEQ ID NO: 472686 - DNA, 25 bp, Artificial
  probe
  misc_feature (1)..(25): SEQ ID NO: 7613; WAN024C2C; Start 5; Stop 29
aggatacgatgaaagatagttattg

SEQ ID NO: 472687 - DNA, 25 bp, Artificial
  probe
  misc_feature (1)..(25): SEQ ID NO: 7613; WAN024C2C; Start 10; Stop 34
acgatgaaagatagttattggttaa

SEQ ID NO: 472688 - DNA, 25 bp, Artificial
  probe
  misc_feature (1)..(25): SEQ ID NO: 7613; WAN024C2C; Start 8; Stop 32
atacgatgaaagatagttattggtt

SEQ ID NO: 472689 - DNA, 25 bp, Artificial
  probe
  misc_feature (1)..(25): SEQ ID NO: 7613; WAN024C2C; Start 4; Stop 28
gaggatacgatgaaagatagttatt

SEQ ID NO: 472690 - DNA, 25 bp, Artificial
  probe
  misc_feature (1)..(25): SEQ ID NO: 7613; WAN024C2C; Start 9; Stop 33
tacgatgaaagatagttattggtta

SEQ ID NO: 472691 - DNA, 25 bp, Artificial
  probe
  misc_feature (1)..(25): SEQ ID NO: 7613; WAN024C2C; Start 11; Stop 35
cgatgaaagatagttattggttaaa

SEQ ID NO: 472692 - DNA, 25 bp, Artificial
  probe
  misc_feature (1)..(25): SEQ ID NO: 7613; WAN024C2C; Start 22; Stop 46
agttattggttaaattattttccgg

SEQ ID NO: 472693 - DNA, 25 bp, Artificial
  probe
  misc_feature (1)..(25): SEQ ID NO: 7614; WAN024FDT; Start 200; Stop 224
aagaactagatgacaatgtggaact

SEQ ID NO: 472694 - DNA, 25 bp, Artificial
  probe
  misc_feature (1)..(25): SEQ ID NO: 7614; WAN024FDT; Start 199; Stop 223
gaagaactagatgacaatgtggaac

SEQ ID NO: 472695 - DNA, 25 bp, Artificial
  probe
  misc_feature (1)..(25): SEQ ID NO: 7614; WAN024FDT; Start 427; Stop 451
cgtaatgttgttccaagtatccatc

SEQ ID NO: 472696 - DNA, 25 bp, Artificial
  probe
  misc_feature (1)..(25): SEQ ID NO: 7614; WAN024FDT; Start 198; Stop 222
agaagaactagatgacaatgtggaa

SEQ ID NO: 472697 - DNA, 25 bp, Artificial
  probe
  misc_feature (1)..(25): SEQ ID NO: 7614; WAN024FDT; Start 422; Stop 446
gtaagcgtaatgttgttccaagtat

SEQ ID NO: 472698 - DNA, 25 bp, Artificial
  probe
  misc_feature (1)..(25): SEQ ID NO: 7614; WAN024FDT; Start 201; Stop 225
agaactagatgacaatgtggaactg

SEQ ID NO: 472699 - DNA, 25 bp, Artificial
  probe
  misc_feature (1)..(25): SEQ ID NO: 7614; WAN024FDT; Start 421; Stop 445
agtaagcgtaatgttgttccaagta

SEQ ID NO: 472700 - DNA, 25 bp, Artificial
  probe
  misc_feature (1)..(25): SEQ ID NO: 7614; WAN024FDT; Start 423; Stop 447
taagcgtaatgttgttccaagtatc

SEQ ID NO: 472701 - DNA, 25 bp, Artificial
  probe
  misc_feature (1)..(25): SEQ ID NO: 7614; WAN024FDT; Start 194; Stop 218
tggtagaagaactagatgacaatgt

SEQ ID NO: 472702 - DNA, 25 bp, Artificial
  probe
  misc_feature (1)..(25): SEQ ID NO: 7614; WAN024FDT; Start 196; Stop 220
gtagaagaactagatgacaatgtgg

SEQ ID NO: 472703 - DNA, 25 bp, Artificial
  probe
  misc_feature (1)..(25): SEQ ID NO: 7614; WAN024FDT; Start 195; Stop 219
ggtagaagaactagatgacaatgtg

SEQ ID NO: 472704 - DNA, 25 bp, Artificial
  probe
  misc_feature (1)..(25): SEQ ID NO: 7614; WAN024FDT; Start 197; Stop 221
tagaagaactagatgacaatgtgga

SEQ ID NO: 472705 - DNA, 25 bp, Artificial
  probe
  misc_feature (1)..(25): SEQ ID NO: 7614; WAN024FDT; Start 428; Stop 452
gtaatgttgttccaagtatccatct

SEQ ID NO: 472706 - DNA, 25 bp, Artificial
  probe
  misc_feature (1)..(25): SEQ ID NO: 7614; WAN024FDT; Start 420; Stop 444
aagtaagcgtaatgttgttccaagt

SEQ ID NO: 472707 - DNA, 25 bp, Artificial
  probe
  misc_feature (1)..(25): SEQ ID NO: 7614; WAN024FDT; Start 426; Stop 450
gcgtaatgttgttccaagtatccat

SEQ ID NO: 472708 - DNA, 25 bp, Artificial
  probe
  misc_feature (1)..(25): SEQ ID NO: 7614; WAN024FDT; Start 424; Stop 448
aagcgtaatgttgttccaagtatcc

SEQ ID NO: 472709 - DNA, 25 bp, Artificial
  probe
  misc_feature (1)..(25): SEQ ID NO: 7614; WAN024FDT; Start 429; Stop 453
taatgttgttccaagtatccatctt

SEQ ID NO: 472710 - DNA, 25 bp, Artificial
  probe
  misc_feature (1)..(25): SEQ ID NO: 7614; WAN024FDT; Start 202; Stop 226
gaactagatgacaatgtggaactgc

SEQ ID NO: 472711 - DNA, 25 bp, Artificial
  probe
  misc_feature (1)..(25): SEQ ID NO: 7614; WAN024FDT; Start 190; Stop 214
gaattggtagaagaactagatgaca

SEQ ID NO: 472712 - DNA, 25 bp, Artificial
  probe
  misc_feature (1)..(25): SEQ ID NO: 7614; WAN024FDT; Start 189; Stop 213
tgaattggtagaagaactagatgac

SEQ ID NO: 472713 - DNA, 25 bp, Artificial
  probe
  misc_feature (1)..(25): SEQ ID NO: 7614; WAN024FDT; Start 193; Stop 217
ttggtagaagaactagatgacaatg

SEQ ID NO: 472714 - DNA, 25 bp, Artificial
  probe
  misc_feature (1)..(25): SEQ ID NO: 7614; WAN024FDT; Start 496; Stop 520
gaccgcatcttagtagcctatgaag

SEQ ID NO: 472715 - DNA, 25 bp, Artificial
  probe
  misc_feature (1)..(25): SEQ ID NO: 7614; WAN024FDT; Start 118; Stop 142
gaggttactttggtctttgatgatg

SEQ ID NO: 472716 - DNA, 25 bp, Artificial
  probe
  misc_feature (1)..(25): SEQ ID NO: 7614; WAN024FDT; Start 117; Stop 141
tgaggttactttggtctttgatgat

SEQ ID NO: 472717 - DNA, 25 bp, Artificial
  probe
  misc_feature (1)..(25): SEQ ID NO: 7614; WAN024FDT; Start 116; Stop 140
atgaggttactttggtctttgatga

SEQ ID NO: 472718 - DNA, 25 bp, Artificial
  probe
  misc_feature (1)..(25): SEQ ID NO: 7614; WAN024FDT; Start 115; Stop 139
gatgaggttactttggtctttgatg

SEQ ID NO: 472719 - DNA, 25 bp, Artificial
  probe
  misc_feature (1)..(25): SEQ ID NO: 7614; WAN024FDT; Start 114; Stop 138
tgatgaggttactttggtctttgat

SEQ ID NO: 472720 - DNA, 25 bp, Artificial
  probe
  misc_feature (1)..(25): SEQ ID NO: 7614; WAN024FDT; Start 113; Stop 137
atgatgaggttactttggtctttga

SEQ ID NO: 472721 - DNA, 25 bp, Artificial
  probe
  misc_feature (1)..(25): SEQ ID NO: 7614; WAN024FDT; Start 112; Stop 136
gatgatgaggttactttggtctttg

SEQ ID NO: 472722 - DNA, 25 bp, Artificial
  probe
  misc_feature (1)..(25): SEQ ID NO: 7614; WAN024FDT; Start 425; Stop 449
agcgtaatgttgttccaagtatcca

SEQ ID NO: 472723 - DNA, 25 bp, Artificial
  probe
  misc_feature (1)..(25): SEQ ID NO: 7614; WAN024FDT; Start 121; Stop 145
gttactttggtctttgatgatggaa

SEQ ID NO: 472724 - DNA, 25 bp, Artificial
  probe
  misc_feature (1)..(25): SEQ ID NO: 7614; WAN024FDT; Start 188; Stop 212
ttgaattggtagaagaactagatga

SEQ ID NO: 472725 - DNA, 25 bp, Artificial
  probe
  misc_feature (1)..(25): SEQ ID NO: 7614; WAN024FDT; Start 119; Stop 143
aggttactttggtctttgatgatgg

SEQ ID NO: 472726 - DNA, 25 bp, Artificial
  probe
  misc_feature (1)..(25): SEQ ID NO: 7615; WAN024CIL; Start 657; Stop 681
actgaagcacattattctaagtgaa

SEQ ID NO: 472727 - DNA, 25 bp, Artificial
  probe
  misc_feature (1)..(25): SEQ ID NO: 7615; WAN024CIL; Start 438; Stop 462
taagaacaagcctttagcagaagat

SEQ ID NO: 472728 - DNA, 25 bp, Artificial
  probe
  misc_feature (1)..(25): SEQ ID NO: 7615; WAN024CIL; Start 654; Stop 678
tgtactgaagcacattattctaagt

SEQ ID NO: 472729 - DNA, 25 bp, Artificial
  probe
  misc_feature (1)..(25): SEQ ID NO: 7615; WAN024CIL; Start 656; Stop 680
tactgaagcacattattctaagtga

SEQ ID NO: 472730 - DNA, 25 bp, Artificial
  probe
  misc_feature (1)..(25): SEQ ID NO: 7615; WAN024CIL; Start 439; Stop 463
aagaacaagcctttagcagaagatg

SEQ ID NO: 472731 - DNA, 25 bp, Artificial
  probe
  misc_feature (1)..(25): SEQ ID NO: 7615; WAN024CIL; Start 655; Stop 679
gtactgaagcacattattctaagtg

SEQ ID NO: 472732 - DNA, 25 bp, Artificial
  probe
  misc_feature (1)..(25): SEQ ID NO: 7615; WAN024CIL; Start 18; Stop 42
gacaggtaagactttgcttgctaag

SEQ ID NO: 472733 - DNA, 25 bp, Artificial
  probe
  misc_feature (1)..(25): SEQ ID NO: 7615; WAN024CIL; Start 444; Stop 468
caagcctttagcagaagatgttgat

SEQ ID NO: 472734 - DNA, 25 bp, Artificial
  probe
  misc_feature (1)..(25): SEQ ID NO: 7615; WAN024CIL; Start 325; Stop 349
aaccgttcagatgtacttgatcctg

SEQ ID NO: 472735 - DNA, 25 bp, Artificial
  probe
  misc_feature (1)..(25): SEQ ID NO: 7615; WAN024CIL; Start 437; Stop 461
ctaagaacaagcctttagcagaaga

SEQ ID NO: 472736 - DNA, 25 bp, Artificial
  probe
  misc_feature (1)..(25): SEQ ID NO: 7615; WAN024CIL; Start 653; Stop 677
ttgtactgaagcacattattctaag

SEQ ID NO: 472737 - DNA, 25 bp, Artificial
  probe
  misc_feature (1)..(25): SEQ ID NO: 7615; WAN024CIL; Start 658; Stop 682
ctgaagcacattattctaagtgaat

SEQ ID NO: 472738 - DNA, 25 bp, Artificial
  probe
  misc_feature (1)..(25): SEQ ID NO: 7615; WAN024CIL; Start 322; Stop 346
acaaaccgttcagatgtacttgatc

SEQ ID NO: 472739 - DNA, 25 bp, Artificial
  probe
  misc_feature (1)..(25): SEQ ID NO: 7615; WAN024CIL; Start 321; Stop 345
gacaaaccgttcagatgtacttgat

SEQ ID NO: 472740 - DNA, 25 bp, Artificial
  probe
  misc_feature (1)..(25): SEQ ID NO: 7615; WAN024CIL; Start 973; Stop 997
agtgatttgtatcgtcaactaacta

SEQ ID NO: 472741 - DNA, 25 bp, Artificial
  probe
  misc_feature (1)..(25): SEQ ID NO: 7615; WAN024CIL; Start 498; Stop 522
ctttgttggtgctgatttagttcgg

SEQ ID NO: 472742 - DNA, 25 bp, Artificial
  probe
  misc_feature (1)..(25): SEQ ID NO: 7615; WAN024CIL; Start 324; Stop 348
aaaccgttcagatgtacttgatcct

SEQ ID NO: 472743 - DNA, 25 bp, Artificial
  probe
  misc_feature (1)..(25): SEQ ID NO: 7615; WAN024CIL; Start 323; Stop 347
caaaccgttcagatgtacttgatcc

SEQ ID NO: 472744 - DNA, 25 bp, Artificial
  probe
  misc_feature (1)..(25): SEQ ID NO: 7615; WAN024CIL; Start 659; Stop 683
tgaagcacattattctaagtgaatt

SEQ ID NO: 472745 - DNA, 25 bp, Artificial
  probe
  misc_feature (1)..(25): SEQ ID NO: 7615; WAN024CIL; Start 496; Stop 520
ggctttgttggtgctgatttagttc

SEQ ID NO: 472746 - DNA, 25 bp, Artificial
  probe
  misc_feature (1)..(25): SEQ ID NO: 7615; WAN024CIL; Start 440; Stop 464
agaacaagcctttagcagaagatgt

SEQ ID NO: 472747 - DNA, 25 bp, Artificial
  probe
  misc_feature (1)..(25): SEQ ID NO: 7615; WAN024CIL; Start 19; Stop 43
acaggtaagactttgcttgctaagg

SEQ ID NO: 472748 - DNA, 25 bp, Artificial
  probe
  misc_feature (1)..(25): SEQ ID NO: 7615; WAN024CIL; Start 17; Stop 41
ggacaggtaagactttgcttgctaa

SEQ ID NO: 472749 - DNA, 25 bp, Artificial
  probe
  misc_feature (1)..(25): SEQ ID NO: 7615; WAN024CIL; Start 974; Stop 998
gtgatttgtatcgtcaactaactaa

SEQ ID NO: 472750 - DNA, 25 bp, Artificial
  probe
  misc_feature (1)..(25): SEQ ID NO: 7615; WAN024CIL; Start 968; Stop 992
tagatagtgatttgtatcgtcaact

SEQ ID NO: 472751 - DNA, 25 bp, Artificial
  probe
  misc_feature (1)..(25): SEQ ID NO: 7615; WAN024CIL; Start 443; Stop 467
acaagcctttagcagaagatgttga

SEQ ID NO: 472752 - DNA, 25 bp, Artificial
  probe
  misc_feature (1)..(25): SEQ ID NO: 7615; WAN024CIL; Start 497; Stop 521
gctttgttggtgctgatttagttcg

SEQ ID NO: 472753 - DNA, 25 bp, Artificial
  probe
  misc_feature (1)..(25): SEQ ID NO: 7615; WAN024CIL; Start 495; Stop 519
aggctttgttggtgctgatttagtt

SEQ ID NO: 472754 - DNA, 25 bp, Artificial
  probe
  misc_feature (1)..(25): SEQ ID NO: 7615; WAN024CIL; Start 509; Stop 533
ctgatttagttcgggtggctattgg

SEQ ID NO: 472755 - DNA, 25 bp, Artificial
  probe
  misc_feature (1)..(25): SEQ ID NO: 7615; WAN024CIL; Start 972; Stop 996
tagtgatttgtatcgtcaactaact

SEQ ID NO: 472756 - DNA, 25 bp, Artificial
  probe
  misc_feature (1)..(25): SEQ ID NO: 7615; WAN024CIL; Start 567; Stop 591
ccctgaggaatactttgaaacaccg

SEQ ID NO: 472757 - DNA, 25 bp, Artificial
  probe
  misc_feature (1)..(25): SEQ ID NO: 7615; WAN024CIL; Start 969; Stop 993
agatagtgatttgtatcgtcaacta

SEQ ID NO: 472758 - DNA, 25 bp, Artificial
  probe
  misc_feature (1)..(25): SEQ ID NO: 7615; WAN024CIL; Start 562; Stop 586
ttagcccctgaggaatactttgaaa

SEQ ID NO: 472759 - DNA, 25 bp, Artificial
  probe
  misc_feature (1)..(25): SEQ ID NO: 7616; WAN024BK2; Start 40; Stop 64
ttgattgaaagggttagtattgaca

SEQ ID NO: 472760 - DNA, 25 bp, Artificial
  probe
  misc_feature (1)..(25): SEQ ID NO: 7616; WAN024BK2; Start 41; Stop 65
tgattgaaagggttagtattgacaa

SEQ ID NO: 472761 - DNA, 25 bp, Artificial
  probe
  misc_feature (1)..(25): SEQ ID NO: 7616; WAN024BK2; Start 39; Stop 63
attgattgaaagggttagtattgac

SEQ ID NO: 472762 - DNA, 25 bp, Artificial
  probe
  misc_feature (1)..(25): SEQ ID NO: 7616; WAN024BK2; Start 30; Stop 54
aactaatgaattgattgaaagggtt

SEQ ID NO: 472763 - DNA, 25 bp, Artificial
  probe
  misc_feature (1)..(25): SEQ ID NO: 7616; WAN024BK2; Start 38; Stop 62
aattgattgaaagggttagtattga

SEQ ID NO: 472764 - DNA, 25 bp, Artificial
  probe
  misc_feature (1)..(25): SEQ ID NO: 7616; WAN024BK2; Start 36; Stop 60
tgaattgattgaaagggttagtatt

SEQ ID NO: 472765 - DNA, 25 bp, Artificial
  probe
  misc_feature (1)..(25): SEQ ID NO: 7616; WAN024BK2; Start 34; Stop 58
aatgaattgattgaaagggttagta

SEQ ID NO: 472766 - DNA, 25 bp, Artificial
  probe
  misc_feature (1)..(25): SEQ ID NO: 7616; WAN024BK2; Start 33; Stop 57
taatgaattgattgaaagggttagt

SEQ ID NO: 472767 - DNA, 25 bp, Artificial
  probe
  misc_feature (1)..(25): SEQ ID NO: 7616; WAN024BK2; Start 31; Stop 55
actaatgaattgattgaaagggtta

SEQ ID NO: 472768 - DNA, 25 bp, Artificial
  probe
  misc_feature (1)..(25): SEQ ID NO: 7616; WAN024BK2; Start 29; Stop 53
taactaatgaattgattgaaagggt

SEQ ID NO: 472769 - DNA, 25 bp, Artificial
  probe
  misc_feature (1)..(25): SEQ ID NO: 7616; WAN024BK2; Start 37; Stop 61
gaattgattgaaagggttagtattg

SEQ ID NO: 472770 - DNA, 25 bp, Artificial
  probe
  misc_feature (1)..(25): SEQ ID NO: 7616; WAN024BK2; Start 35; Stop 59
atgaattgattgaaagggttagtat

SEQ ID NO: 472771 - DNA, 25 bp, Artificial
  probe
  misc_feature (1)..(25): SEQ ID NO: 7616; WAN024BK2; Start 42; Stop 66
gattgaaagggttagtattgacaat

SEQ ID NO: 472772 - DNA, 25 bp, Artificial
  probe
  misc_feature (1)..(25): SEQ ID NO: 7616; WAN024BK2; Start 32; Stop 56
ctaatgaattgattgaaagggttag

SEQ ID NO: 472773 - DNA, 25 bp, Artificial
  probe
  misc_feature (1)..(25): SEQ ID NO: 7616; WAN024BK2; Start 44; Stop 68
ttgaaagggttagtattgacaatat

SEQ ID NO: 472774 - DNA, 25 bp, Artificial
  probe
  misc_feature (1)..(25): SEQ ID NO: 7616; WAN024BK2; Start 45; Stop 69
tgaaagggttagtattgacaatatt

SEQ ID NO: 472775 - DNA, 25 bp, Artificial
  probe
  misc_feature (1)..(25): SEQ ID NO: 7616; WAN024BK2; Start 28; Stop 52
ataactaatgaattgattgaaaggg

SEQ ID NO: 472776 - DNA, 25 bp, Artificial
  probe
  misc_feature (1)..(25): SEQ ID NO: 7616; WAN024BK2; Start 1; Stop 25
ttggagttattaatggacttagttt

SEQ ID NO: 472777 - DNA, 25 bp, Artificial
  probe
  misc_feature (1)..(25): SEQ ID NO: 7616; WAN024BK2; Start 43; Stop 67
attgaaagggttagtattgacaata

SEQ ID NO: 472778 - DNA, 25 bp, Artificial
  probe
  misc_feature (1)..(25): SEQ ID NO: 7616; WAN024BK2; Start 2; Stop 26
tggagttattaatggacttagttta

SEQ ID NO: 472779 - DNA, 25 bp, Artificial
  probe
  misc_feature (1)..(25): SEQ ID NO: 7616; WAN024BK2; Start 48; Stop 72
aagggttagtattgacaatattggt

SEQ ID NO: 472780 - DNA, 25 bp, Artificial
  probe
  misc_feature (1)..(25): SEQ ID NO: 7616; WAN024BK2; Start 49; Stop 73
agggttagtattgacaatattggtc

SEQ ID NO: 472781 - DNA, 25 bp, Artificial
  probe
  misc_feature (1)..(25): SEQ ID NO: 7616; WAN024BK2; Start 47; Stop 71
aaagggttagtattgacaatattgg

SEQ ID NO: 472782 - DNA, 25 bp, Artificial
  probe
  misc_feature (1)..(25): SEQ ID NO: 7616; WAN024BK2; Start 46; Stop 70
gaaagggttagtattgacaatattg

SEQ ID NO: 472783 - DNA, 25 bp, Artificial
  probe
  misc_feature (1)..(25): SEQ ID NO: 7616; WAN024BK2; Start 51; Stop 75
ggttagtattgacaatattggtcat

SEQ ID NO: 472784 - DNA, 25 bp, Artificial
  probe
  misc_feature (1)..(25): SEQ ID NO: 7616; WAN024BK2; Start 50; Stop 74
gggttagtattgacaatattggtca

SEQ ID NO: 472785 - DNA, 25 bp, Artificial
  probe
  misc_feature (1)..(25): SEQ ID NO: 7617; WAN024CC9; Start 6; Stop 30
taagtttcgcatcatccctacaaat

SEQ ID NO: 472786 - DNA, 25 bp, Artificial
  probe
  misc_feature (1)..(25): SEQ ID NO: 7617; WAN024CC9; Start 5; Stop 29
ataagtttcgcatcatccctacaaa

SEQ ID NO: 472787 - DNA, 25 bp, Artificial
  probe
  misc_feature (1)..(25): SEQ ID NO: 7617; WAN024CC9; Start 4; Stop 28
gataagtttcgcatcatccctacaa

SEQ ID NO: 472788 - DNA, 25 bp, Artificial
  probe
  misc_feature (1)..(25): SEQ ID NO: 7617; WAN024CC9; Start 7; Stop 31
aagtttcgcatcatccctacaaatc

SEQ ID NO: 472789 - DNA, 25 bp, Artificial
  probe
  misc_feature (1)..(25): SEQ ID NO: 7617; WAN024CC9; Start 8; Stop 32
agtttcgcatcatccctacaaatcc

SEQ ID NO: 472790 - DNA, 25 bp, Artificial
  probe
  misc_feature (1)..(25): SEQ ID NO: 7617; WAN024CC9; Start 9; Stop 33
gtttcgcatcatccctacaaatccc

SEQ ID NO: 472791 - DNA, 25 bp, Artificial
  probe
  misc_feature (1)..(25): SEQ ID NO: 7617; WAN024CC9; Start 12; Stop 36
tcgcatcatccctacaaatcccaat

SEQ ID NO: 472792 - DNA, 25 bp, Artificial
  probe
  misc_feature (1)..(25): SEQ ID NO: 7617; WAN024CC9; Start 15; Stop 39
catcatccctacaaatcccaatgcg

SEQ ID NO: 472793 - DNA, 25 bp, Artificial
  probe
  misc_feature (1)..(25): SEQ ID NO: 7617; WAN024CC9; Start 13; Stop 37
cgcatcatccctacaaatcccaatg

SEQ ID NO: 472794 - DNA, 25 bp, Artificial
  probe
  misc_feature (1)..(25): SEQ ID NO: 7617; WAN024CC9; Start 60; Stop 84
tatcgtagcttttcttattcttggc

SEQ ID NO: 472795 - DNA, 25 bp, Artificial
  probe
  misc_feature (1)..(25): SEQ ID NO: 7617; WAN024CC9; Start 11; Stop 35
ttcgcatcatccctacaaatcccaa

SEQ ID NO: 472796 - DNA, 25 bp, Artificial
  probe
  misc_feature (1)..(25): SEQ ID NO: 7617; WAN024CC9; Start 10; Stop 34
tttcgcatcatccctacaaatccca

SEQ ID NO: 472797 - DNA, 25 bp, Artificial
  probe
  misc_feature (1)..(25): SEQ ID NO: 7617; WAN024CC9; Start 57; Stop 81
gcctatcgtagcttttcttattctt

SEQ ID NO: 472798 - DNA, 25 bp, Artificial
  probe
  misc_feature (1)..(25): SEQ ID NO: 7617; WAN024CC9; Start 22; Stop 46
cctacaaatcccaatgcggacatag

SEQ ID NO: 472799 - DNA, 25 bp, Artificial
  probe
  misc_feature (1)..(25): SEQ ID NO: 7617; WAN024CC9; Start 61; Stop 85
atcgtagcttttcttattcttggcg

SEQ ID NO: 472800 - DNA, 25 bp, Artificial
  probe
  misc_feature (1)..(25): SEQ ID NO: 7617; WAN024CC9; Start 1; Stop 25
ttggataagtttcgcatcatcccta

SEQ ID NO: 472801 - DNA, 25 bp, Artificial
  probe
  misc_feature (1)..(25): SEQ ID NO: 7617; WAN024CC9; Start 65; Stop 89
tagcttttcttattcttggcgtcct

SEQ ID NO: 472802 - DNA, 25 bp, Artificial
  probe
  misc_feature (1)..(25): SEQ ID NO: 7617; WAN024CC9; Start 64; Stop 88
gtagcttttcttattcttggcgtcc

SEQ ID NO: 472803 - DNA, 25 bp, Artificial
  probe
  misc_feature (1)..(25): SEQ ID NO: 7617; WAN024CC9; Start 23; Stop 47
ctacaaatcccaatgcggacatagc

SEQ ID NO: 472804 - DNA, 25 bp, Artificial
  probe
  misc_feature (1)..(25): SEQ ID NO: 7617; WAN024CC9; Start 59; Stop 83
ctatcgtagcttttcttattcttgg

SEQ ID NO: 472805 - DNA, 25 bp, Artificial
  probe
  misc_feature (1)..(25): SEQ ID NO: 7617; WAN024CC9; Start 58; Stop 82
cctatcgtagcttttcttattcttg

SEQ ID NO: 472806 - DNA, 25 bp, Artificial
  probe
  misc_feature (1)..(25): SEQ ID NO: 7617; WAN024CC9; Start 3; Stop 27
ggataagtttcgcatcatccctaca

SEQ ID NO: 472807 - DNA, 25 bp, Artificial
  probe
  misc_feature (1)..(25): SEQ ID NO: 7617; WAN024CC9; Start 2; Stop 26
tggataagtttcgcatcatccctac

SEQ ID NO: 472808 - DNA, 25 bp, Artificial
  probe
  misc_feature (1)..(25): SEQ ID NO: 7617; WAN024CC9; Start 63; Stop 87
cgtagcttttcttattcttggcgtc

SEQ ID NO: 472809 - DNA, 25 bp, Artificial
  probe
  misc_feature (1)..(25): SEQ ID NO: 7617; WAN024CC9; Start 43; Stop 67
atagcagatagccagcctatcgtag

SEQ ID NO: 472810 - DNA, 25 bp, Artificial
  probe
  misc_feature (1)..(25): SEQ ID NO: 7617; WAN024CC9; Start 62; Stop 86
tcgtagcttttcttattcttggcgt

SEQ ID NO: 472811 - DNA, 25 bp, Artificial
  probe
  misc_feature (1)..(25): SEQ ID NO: 7617; WAN024CC9; Start 42; Stop 66
catagcagatagccagcctatcgta

SEQ ID NO: 472812 - DNA, 25 bp, Artificial
  probe
  misc_feature (1)..(25): SEQ ID NO: 7617; WAN024CC9; Start 16; Stop 40
atcatccctacaaatcccaatgcgg

SEQ ID NO: 472813 - DNA, 25 bp, Artificial
  probe
  misc_feature (1)..(25): SEQ ID NO: 7617; WAN024CC9; Start 56; Stop 80
agcctatcgtagcttttcttattct

SEQ ID NO: 472814 - DNA, 25 bp, Artificial
  probe
  misc_feature (1)..(25): SEQ ID NO: 7617; WAN024CC9; Start 55; Stop 79
cagcctatcgtagcttttcttattc

SEQ ID NO: 472815 - DNA, 25 bp, Artificial
  probe
  misc_feature (1)..(25): SEQ ID NO: 7617; WAN024CC9; Start 54; Stop 78
ccagcctatcgtagcttttcttatt

SEQ ID NO: 472816 - DNA, 25 bp, Artificial
  probe
  misc_feature (1)..(25): SEQ ID NO: 7617; WAN024CC9; Start 21; Stop 45
ccctacaaatcccaatgcggacata

SEQ ID NO: 472817 - DNA, 25 bp, Artificial
  probe
  misc_feature (1)..(25): SEQ ID NO: 7617; WAN024CC9; Start 66; Stop 90
agcttttcttattcttggcgtcctc

SEQ ID NO: 472818 - DNA, 25 bp, Artificial
  probe
  misc_feature (1)..(25): SEQ ID NO: 7618; WAN024COZ; Start 79; Stop 103
cttctgattcctctggtgattcttc

SEQ ID NO: 472819 - DNA, 25 bp, Artificial
  probe
  misc_feature (1)..(25): SEQ ID NO: 7618; WAN024COZ; Start 80; Stop 104
ttctgattcctctggtgattcttct

SEQ ID NO: 472820 - DNA, 25 bp, Artificial
  probe
  misc_feature (1)..(25): SEQ ID NO: 7618; WAN024COZ; Start 78; Stop 102
tcttctgattcctctggtgattctt

SEQ ID NO: 472821 - DNA, 25 bp, Artificial
  probe
  misc_feature (1)..(25): SEQ ID NO: 7618; WAN024COZ; Start 77; Stop 101
ttcttctgattcctctggtgattct

SEQ ID NO: 472822 - DNA, 25 bp, Artificial
  probe
  misc_feature (1)..(25): SEQ ID NO: 7618; WAN024COZ; Start 76; Stop 100
gttcttctgattcctctggtgattc

SEQ ID NO: 472823 - DNA, 25 bp, Artificial
  probe
  misc_feature (1)..(25): SEQ ID NO: 7618; WAN024COZ; Start 81; Stop 105
tctgattcctctggtgattcttctg

SEQ ID NO: 472824 - DNA, 25 bp, Artificial
  probe
  misc_feature (1)..(25): SEQ ID NO: 7618; WAN024COZ; Start 85; Stop 109
attcctctggtgattcttctggttc

SEQ ID NO: 472825 - DNA, 25 bp, Artificial
  probe
  misc_feature (1)..(25): SEQ ID NO: 7618; WAN024COZ; Start 84; Stop 108
gattcctctggtgattcttctggtt

SEQ ID NO: 472826 - DNA, 25 bp, Artificial
  probe
  misc_feature (1)..(25): SEQ ID NO: 7618; WAN024COZ; Start 75; Stop 99
ggttcttctgattcctctggtgatt

SEQ ID NO: 472827 - DNA, 25 bp, Artificial
  probe
  misc_feature (1)..(25): SEQ ID NO: 7618; WAN024COZ; Start 96; Stop 120
gattcttctggttcctctgttggtt

SEQ ID NO: 472828 - DNA, 25 bp, Artificial
  probe
  misc_feature (1)..(25): SEQ ID NO: 7618; WAN024COZ; Start 82; Stop 106
ctgattcctctggtgattcttctgg

SEQ ID NO: 472829 - DNA, 25 bp, Artificial
  probe
  misc_feature (1)..(25): SEQ ID NO: 7618; WAN024COZ; Start 22; Stop 46
gtaaatcttcagcctctctcagttt

SEQ ID NO: 472830 - DNA, 25 bp, Artificial
  probe
  misc_feature (1)..(25): SEQ ID NO: 7618; WAN024COZ; Start 21; Stop 45
agtaaatcttcagcctctctcagtt

SEQ ID NO: 472831 - DNA, 25 bp, Artificial
  probe
  misc_feature (1)..(25): SEQ ID NO: 7618; WAN024COZ; Start 15; Stop 39
tttccaagtaaatcttcagcctctc

SEQ ID NO: 472832 - DNA, 25 bp, Artificial
  probe
  misc_feature (1)..(25): SEQ ID NO: 7618; WAN024COZ; Start 19; Stop 43
caagtaaatcttcagcctctctcag

SEQ ID NO: 472833 - DNA, 25 bp, Artificial
  probe
  misc_feature (1)..(25): SEQ ID NO: 7618; WAN024COZ; Start 83; Stop 107
tgattcctctggtgattcttctggt

SEQ ID NO: 472834 - DNA, 25 bp, Artificial
  probe
  misc_feature (1)..(25): SEQ ID NO: 7618; WAN024COZ; Start 20; Stop 44
aagtaaatcttcagcctctctcagt

SEQ ID NO: 472835 - DNA, 25 bp, Artificial
  probe
  misc_feature (1)..(25): SEQ ID NO: 7618; WAN024COZ; Start 94; Stop 118
gtgattcttctggttcctctgttgg

SEQ ID NO: 472836 - DNA, 25 bp, Artificial
  probe
  misc_feature (1)..(25): SEQ ID NO: 7618; WAN024COZ; Start 93; Stop 117
ggtgattcttctggttcctctgttg

SEQ ID NO: 472837 - DNA, 25 bp, Artificial
  probe
  misc_feature (1)..(25): SEQ ID NO: 7618; WAN024COZ; Start 16; Stop 40
ttccaagtaaatcttcagcctctct

SEQ ID NO: 472838 - DNA, 25 bp, Artificial
  probe
  misc_feature (1)..(25): SEQ ID NO: 7618; WAN024COZ; Start 89; Stop 113
ctctggtgattcttctggttcctct

SEQ ID NO: 472839 - DNA, 25 bp, Artificial
  probe
  misc_feature (1)..(25): SEQ ID NO: 7618; WAN024COZ; Start 17; Stop 41
tccaagtaaatcttcagcctctctc

SEQ ID NO: 472840 - DNA, 25 bp, Artificial
  probe
  misc_feature (1)..(25): SEQ ID NO: 7618; WAN024COZ; Start 95; Stop 119
tgattcttctggttcctctgttggt

SEQ ID NO: 472841 - DNA, 25 bp, Artificial
  probe
  misc_feature (1)..(25): SEQ ID NO: 7618; WAN024COZ; Start 92; Stop 116
tggtgattcttctggttcctctgtt

SEQ ID NO: 472842 - DNA, 25 bp, Artificial
  probe
  misc_feature (1)..(25): SEQ ID NO: 7618; WAN024COZ; Start 97; Stop 121
attcttctggttcctctgttggttt

SEQ ID NO: 472843 - DNA, 25 bp, Artificial
  probe
  misc_feature (1)..(25): SEQ ID NO: 7618; WAN024COZ; Start 18; Stop 42
ccaagtaaatcttcagcctctctca

SEQ ID NO: 472844 - DNA, 25 bp, Artificial
  probe
  misc_feature (1)..(25): SEQ ID NO: 7618; WAN024COZ; Start 74; Stop 98
aggttcttctgattcctctggtgat

SEQ ID NO: 472845 - DNA, 25 bp, Artificial
  probe
  misc_feature (1)..(25): SEQ ID NO: 7618; WAN024COZ; Start 90; Stop 114
tctggtgattcttctggttcctctg

SEQ ID NO: 472846 - DNA, 25 bp, Artificial
  probe
  misc_feature (1)..(25): SEQ ID NO: 7618; WAN024COZ; Start 91; Stop 115
ctggtgattcttctggttcctctgt

SEQ ID NO: 472847 - DNA, 25 bp, Artificial
  probe
  misc_feature (1)..(25): SEQ ID NO: 7618; WAN024COZ; Start 86; Stop 110
ttcctctggtgattcttctggttcc

SEQ ID NO: 472848 - DNA, 25 bp, Artificial
  probe
  misc_feature (1)..(25): SEQ ID NO: 7618; WAN024COZ; Start 88; Stop 112
cctctggtgattcttctggttcctc

SEQ ID NO: 472849 - DNA, 25 bp, Artificial
  probe
  misc_feature (1)..(25): SEQ ID NO: 7618; WAN024COZ; Start 23; Stop 47
taaatcttcagcctctctcagtttt

SEQ ID NO: 472850 - DNA, 25 bp, Artificial
  probe
  misc_feature (1)..(25): SEQ ID NO: 7618; WAN024COZ; Start 14; Stop 38
ttttccaagtaaatcttcagcctct

SEQ ID NO: 472851 - DNA, 25 bp, Artificial
  probe
  misc_feature (1)..(25): SEQ ID NO: 7619; WAN024EYX; Start 75; Stop 99
tgacaaagctaaaactagtaaccag

SEQ ID NO: 472852 - DNA, 25 bp, Artificial
  probe
  misc_feature (1)..(25): SEQ ID NO: 7619; WAN024EYX; Start 74; Stop 98
atgacaaagctaaaactagtaacca

SEQ ID NO: 472853 - DNA, 25 bp, Artificial
  probe
  misc_feature (1)..(25): SEQ ID NO: 7619; WAN024EYX; Start 90; Stop 114
tagtaaccagcttttagccttccaa

SEQ ID NO: 472854 - DNA, 25 bp, Artificial
  probe
  misc_feature (1)..(25): SEQ ID NO: 7619; WAN024EYX; Start 49; Stop 73
gcacctgctggggaaagaattaaaa

SEQ ID NO: 472855 - DNA, 25 bp, Artificial
  probe
  misc_feature (1)..(25): SEQ ID NO: 7619; WAN024EYX; Start 89; Stop 113
ctagtaaccagcttttagccttcca

SEQ ID NO: 472856 - DNA, 25 bp, Artificial
  probe
  misc_feature (1)..(25): SEQ ID NO: 7619; WAN024EYX; Start 73; Stop 97
aatgacaaagctaaaactagtaacc

SEQ ID NO: 472857 - DNA, 25 bp, Artificial
  probe
  misc_feature (1)..(25): SEQ ID NO: 7619; WAN024EYX; Start 86; Stop 110
aaactagtaaccagcttttagcctt

SEQ ID NO: 472858 - DNA, 25 bp, Artificial
  probe
  misc_feature (1)..(25): SEQ ID NO: 7619; WAN024EYX; Start 85; Stop 109
aaaactagtaaccagcttttagcct

SEQ ID NO: 472859 - DNA, 25 bp, Artificial
  probe
  misc_feature (1)..(25): SEQ ID NO: 7619; WAN024EYX; Start 76; Stop 100
gacaaagctaaaactagtaaccagc

SEQ ID NO: 472860 - DNA, 25 bp, Artificial
  probe
  misc_feature (1)..(25): SEQ ID NO: 7619; WAN024EYX; Start 87; Stop 111
aactagtaaccagcttttagccttc

SEQ ID NO: 472861 - DNA, 25 bp, Artificial
  probe
  misc_feature (1)..(25): SEQ ID NO: 7619; WAN024EYX; Start 84; Stop 108
taaaactagtaaccagcttttagcc

SEQ ID NO: 472862 - DNA, 25 bp, Artificial
  probe
  misc_feature (1)..(25): SEQ ID NO: 7619; WAN024EYX; Start 88; Stop 112
actagtaaccagcttttagccttcc

SEQ ID NO: 472863 - DNA, 25 bp, Artificial
  probe
  misc_feature (1)..(25): SEQ ID NO: 7619; WAN024EYX; Start 72; Stop 96
aaatgacaaagctaaaactagtaac

SEQ ID NO: 472864 - DNA, 25 bp, Artificial
  probe
  misc_feature (1)..(25): SEQ ID NO: 7619; WAN024EYX; Start 71; Stop 95
aaaatgacaaagctaaaactagtaa

SEQ ID NO: 472865 - DNA, 25 bp, Artificial
  probe
  misc_feature (1)..(25): SEQ ID NO: 7619; WAN024EYX; Start 77; Stop 101
acaaagctaaaactagtaaccagct

SEQ ID NO: 472866 - DNA, 25 bp, Artificial
  probe
  misc_feature (1)..(25): SEQ ID NO: 7619; WAN024EYX; Start 81; Stop 105
agctaaaactagtaaccagctttta

SEQ ID NO: 472867 - DNA, 25 bp, Artificial
  probe
  misc_feature (1)..(25): SEQ ID NO: 7620; WAN024ASS; Start 527; Stop 551
acagacgcttggataatctctataa

SEQ ID NO: 472868 - DNA, 25 bp, Artificial
  probe
  misc_feature (1)..(25): SEQ ID NO: 7620; WAN024ASS; Start 170; Stop 194
ttaaggatagaattatcgcaggcaa

SEQ ID NO: 472869 - DNA, 25 bp, Artificial
  probe
  misc_feature (1)..(25): SEQ ID NO: 7620; WAN024ASS; Start 525; Stop 549
gtacagacgcttggataatctctat

SEQ ID NO: 472870 - DNA, 25 bp, Artificial
  probe
  misc_feature (1)..(25): SEQ ID NO: 7620; WAN024ASS; Start 220; Stop 244
tgcgatactttacattgctactttc

SEQ ID NO: 472871 - DNA, 25 bp, Artificial
  probe
  misc_feature (1)..(25): SEQ ID NO: 7620; WAN024ASS; Start 230; Stop 254
tacattgctactttcctcgcttatt

SEQ ID NO: 472872 - DNA, 25 bp, Artificial
  probe
  misc_feature (1)..(25): SEQ ID NO: 7620; WAN024ASS; Start 229; Stop 253
ttacattgctactttcctcgcttat

SEQ ID NO: 472873 - DNA, 25 bp, Artificial
  probe
  misc_feature (1)..(25): SEQ ID NO: 7620; WAN024ASS; Start 221; Stop 245
gcgatactttacattgctactttcc

SEQ ID NO: 472874 - DNA, 25 bp, Artificial
  probe
  misc_feature (1)..(25): SEQ ID NO: 7620; WAN024ASS; Start 228; Stop 252
tttacattgctactttcctcgctta

SEQ ID NO: 472875 - DNA, 25 bp, Artificial
  probe
  misc_feature (1)..(25): SEQ ID NO: 7620; WAN024ASS; Start 219; Stop 243
ttgcgatactttacattgctacttt

SEQ ID NO: 472876 - DNA, 25 bp, Artificial
  probe
  misc_feature (1)..(25): SEQ ID NO: 7620; WAN024ASS; Start 218; Stop 242
attgcgatactttacattgctactt

SEQ ID NO: 472877 - DNA, 25 bp, Artificial
  probe
  misc_feature (1)..(25): SEQ ID NO: 7620; WAN024ASS; Start 42; Stop 66
caatatagatttcttccttcgtggg

SEQ ID NO: 472878 - DNA, 25 bp, Artificial
  probe
  misc_feature (1)..(25): SEQ ID NO: 7620; WAN024ASS; Start 224; Stop 248
atactttacattgctactttcctcg

SEQ ID NO: 472879 - DNA, 25 bp, Artificial
  probe
  misc_feature (1)..(25): SEQ ID NO: 7620; WAN024ASS; Start 222; Stop 246
cgatactttacattgctactttcct

SEQ ID NO: 472880 - DNA, 25 bp, Artificial
  probe
  misc_feature (1)..(25): SEQ ID NO: 7620; WAN024ASS; Start 225; Stop 249
tactttacattgctactttcctcgc

SEQ ID NO: 472881 - DNA, 25 bp, Artificial
  probe
  misc_feature (1)..(25): SEQ ID NO: 7620; WAN024ASS; Start 177; Stop 201
tagaattatcgcaggcaaatatcag

SEQ ID NO: 472882 - DNA, 25 bp, Artificial
  probe
  misc_feature (1)..(25): SEQ ID NO: 7620; WAN024ASS; Start 111; Stop 135
ggatgatgacatggatattgctgtg

SEQ ID NO: 472883 - DNA, 25 bp, Artificial
  probe
  misc_feature (1)..(25): SEQ ID NO: 7620; WAN024ASS; Start 423; Stop 447
ctatgttggagaccatgtggatatg

SEQ ID NO: 472884 - DNA, 25 bp, Artificial
  probe
  misc_feature (1)..(25): SEQ ID NO: 7620; WAN024ASS; Start 180; Stop 204
aattatcgcaggcaaatatcaggtt

SEQ ID NO: 472885 - DNA, 25 bp, Artificial
  probe
  misc_feature (1)..(25): SEQ ID NO: 7620; WAN024ASS; Start 231; Stop 255
acattgctactttcctcgcttattc

SEQ ID NO: 472886 - DNA, 25 bp, Artificial
  probe
  misc_feature (1)..(25): SEQ ID NO: 7620; WAN024ASS; Start 41; Stop 65
acaatatagatttcttccttcgtgg

SEQ ID NO: 472887 - DNA, 25 bp, Artificial
  probe
  misc_feature (1)..(25): SEQ ID NO: 7620; WAN024ASS; Start 217; Stop 241
tattgcgatactttacattgctact

SEQ ID NO: 472888 - DNA, 25 bp, Artificial
  probe
  misc_feature (1)..(25): SEQ ID NO: 7620; WAN024ASS; Start 81; Stop 105
ggcagtcaaatatgatggctttatt

SEQ ID NO: 472889 - DNA, 25 bp, Artificial
  probe
  misc_feature (1)..(25): SEQ ID NO: 7620; WAN024ASS; Start 181; Stop 205
attatcgcaggcaaatatcaggttc

SEQ ID NO: 472890 - DNA, 25 bp, Artificial
  probe
  misc_feature (1)..(25): SEQ ID NO: 7620; WAN024ASS; Start 178; Stop 202
agaattatcgcaggcaaatatcagg

SEQ ID NO: 472891 - DNA, 25 bp, Artificial
  probe
  misc_feature (1)..(25): SEQ ID NO: 7620; WAN024ASS; Start 227; Stop 251
ctttacattgctactttcctcgctt

SEQ ID NO: 472892 - DNA, 25 bp, Artificial
  probe
  misc_feature (1)..(25): SEQ ID NO: 7620; WAN024ASS; Start 143; Stop 167
aaggctacgataaacttccaggtat

SEQ ID NO: 472893 - DNA, 25 bp, Artificial
  probe
  misc_feature (1)..(25): SEQ ID NO: 7620; WAN024ASS; Start 179; Stop 203
gaattatcgcaggcaaatatcaggt

SEQ ID NO: 472894 - DNA, 25 bp, Artificial
  probe
  misc_feature (1)..(25): SEQ ID NO: 7620; WAN024ASS; Start 176; Stop 200
atagaattatcgcaggcaaatatca

SEQ ID NO: 472895 - DNA, 25 bp, Artificial
  probe
  misc_feature (1)..(25): SEQ ID NO: 7620; WAN024ASS; Start 758; Stop 782
agaaatcgcatttaggaggacaata

SEQ ID NO: 472896 - DNA, 25 bp, Artificial
  probe
  misc_feature (1)..(25): SEQ ID NO: 7620; WAN024ASS; Start 610; Stop 634
aaagaagtcatgccagtagagattt

SEQ ID NO: 472897 - DNA, 25 bp, Artificial
  probe
  misc_feature (1)..(25): SEQ ID NO: 7620; WAN024ASS; Start 173; Stop 197
aggatagaattatcgcaggcaaata

SEQ ID NO: 472898 - DNA, 25 bp, Artificial
  probe
  misc_feature (1)..(25): SEQ ID NO: 7620; WAN024ASS; Start 171; Stop 195
taaggatagaattatcgcaggcaaa

SEQ ID NO: 472899 - DNA, 25 bp, Artificial
  probe
  misc_feature (1)..(25): SEQ ID NO: 7620; WAN024ASS; Start 169; Stop 193
tttaaggatagaattatcgcaggca

SEQ ID NO: 472900 - DNA, 25 bp, Artificial
  probe
  misc_feature (1)..(25): SEQ ID NO: 7621; WAN024BWU; Start 285; Stop 309
agaagaaggaactgtagaagacttg

SEQ ID NO: 472901 - DNA, 25 bp, Artificial
  probe
  misc_feature (1)..(25): SEQ ID NO: 7621; WAN024BWU; Start 284; Stop 308
aagaagaaggaactgtagaagactt

SEQ ID NO: 472902 - DNA, 25 bp, Artificial
  probe
  misc_feature (1)..(25): SEQ ID NO: 7621; WAN024BWU; Start 293; Stop 317
gaactgtagaagacttgctcatcaa

SEQ ID NO: 472903 - DNA, 25 bp, Artificial
  probe
  misc_feature (1)..(25): SEQ ID NO: 7621; WAN024BWU; Start 286; Stop 310
gaagaaggaactgtagaagacttgc

SEQ ID NO: 472904 - DNA, 25 bp, Artificial
  probe
  misc_feature (1)..(25): SEQ ID NO: 7621; WAN024BWU; Start 290; Stop 314
aaggaactgtagaagacttgctcat

SEQ ID NO: 472905 - DNA, 25 bp, Artificial
  probe
  misc_feature (1)..(25): SEQ ID NO: 7621; WAN024BWU; Start 287; Stop 311
aagaaggaactgtagaagacttgct

SEQ ID NO: 472906 - DNA, 25 bp, Artificial
  probe
  misc_feature (1)..(25): SEQ ID NO: 7621; WAN024BWU; Start 291; Stop 315
aggaactgtagaagacttgctcatc

SEQ ID NO: 472907 - DNA, 25 bp, Artificial
  probe
  misc_feature (1)..(25): SEQ ID NO: 7621; WAN024BWU; Start 316; Stop 340
aagtatgatgctgacaaccttgaga

SEQ ID NO: 472908 - DNA, 25 bp, Artificial
  probe
  misc_feature (1)..(25): SEQ ID NO: 7621; WAN024BWU; Start 288; Stop 312
agaaggaactgtagaagacttgctc

SEQ ID NO: 472909 - DNA, 25 bp, Artificial
  probe
  misc_feature (1)..(25): SEQ ID NO: 7621; WAN024BWU; Start 292; Stop 316
ggaactgtagaagacttgctcatca

SEQ ID NO: 472910 - DNA, 25 bp, Artificial
  probe
  misc_feature (1)..(25): SEQ ID NO: 7621; WAN024BWU; Start 289; Stop 313
gaaggaactgtagaagacttgctca

SEQ ID NO: 472911 - DNA, 25 bp, Artificial
  probe
  misc_feature (1)..(25): SEQ ID NO: 7621; WAN024BWU; Start 317; Stop 341
agtatgatgctgacaaccttgagac

SEQ ID NO: 472912 - DNA, 25 bp, Artificial
  probe
  misc_feature (1)..(25): SEQ ID NO: 7621; WAN024BWU; Start 275; Stop 299
ggactatcaaagaagaaggaactgt

SEQ ID NO: 472913 - DNA, 25 bp, Artificial
  probe
  misc_feature (1)..(25): SEQ ID NO: 7621; WAN024BWU; Start 272; Stop 296
aagggactatcaaagaagaaggaac

SEQ ID NO: 472914 - DNA, 25 bp, Artificial
  probe
  misc_feature (1)..(25): SEQ ID NO: 7621; WAN024BWU; Start 271; Stop 295
caagggactatcaaagaagaaggaa

SEQ ID NO: 472915 - DNA, 25 bp, Artificial
  probe
  misc_feature (1)..(25): SEQ ID NO: 7621; WAN024BWU; Start 196; Stop 220
ggtgtttccatcattattacttccc

SEQ ID NO: 472916 - DNA, 25 bp, Artificial
  probe
  misc_feature (1)..(25): SEQ ID NO: 7621; WAN024BWU; Start 137; Stop 161
gtttagacattcaatcccgcaatat

SEQ ID NO: 472917 - DNA, 25 bp, Artificial
  probe
  misc_feature (1)..(25): SEQ ID NO: 7621; WAN024BWU; Start 283; Stop 307
aaagaagaaggaactgtagaagact

SEQ ID NO: 472918 - DNA, 25 bp, Artificial
  probe
  misc_feature (1)..(25): SEQ ID NO: 7621; WAN024BWU; Start 282; Stop 306
caaagaagaaggaactgtagaagac

SEQ ID NO: 472919 - DNA, 25 bp, Artificial
  probe
  misc_feature (1)..(25): SEQ ID NO: 7621; WAN024BWU; Start 281; Stop 305
tcaaagaagaaggaactgtagaaga

SEQ ID NO: 472920 - DNA, 25 bp, Artificial
  probe
  misc_feature (1)..(25): SEQ ID NO: 7621; WAN024BWU; Start 274; Stop 298
gggactatcaaagaagaaggaactg

SEQ ID NO: 472921 - DNA, 25 bp, Artificial
  probe
  misc_feature (1)..(25): SEQ ID NO: 7621; WAN024BWU; Start 273; Stop 297
agggactatcaaagaagaaggaact

SEQ ID NO: 472922 - DNA, 25 bp, Artificial
  probe
  misc_feature (1)..(25): SEQ ID NO: 7621; WAN024BWU; Start 178; Stop 202
ttggagttgaaggaattaggtgttt

SEQ ID NO: 472923 - DNA, 25 bp, Artificial
  probe
  misc_feature (1)..(25): SEQ ID NO: 7621; WAN024BWU; Start 177; Stop 201
tttggagttgaaggaattaggtgtt

SEQ ID NO: 472924 - DNA, 25 bp, Artificial
  probe
  misc_feature (1)..(25): SEQ ID NO: 7621; WAN024BWU; Start 268; Stop 292
caccaagggactatcaaagaagaag

SEQ ID NO: 472925 - DNA, 25 bp, Artificial
  probe
  misc_feature (1)..(25): SEQ ID NO: 7621; WAN024BWU; Start 198; Stop 222
tgtttccatcattattacttcccac

SEQ ID NO: 472926 - DNA, 25 bp, Artificial
  probe
  misc_feature (1)..(25): SEQ ID NO: 7621; WAN024BWU; Start 197; Stop 221
gtgtttccatcattattacttccca

SEQ ID NO: 472927 - DNA, 25 bp, Artificial
  probe
  misc_feature (1)..(25): SEQ ID NO: 7621; WAN024BWU; Start 199; Stop 223
gtttccatcattattacttcccact

SEQ ID NO: 472928 - DNA, 25 bp, Artificial
  probe
  misc_feature (1)..(25): SEQ ID NO: 7621; WAN024BWU; Start 195; Stop 219
aggtgtttccatcattattacttcc

SEQ ID NO: 472929 - DNA, 25 bp, Artificial
  probe
  misc_feature (1)..(25): SEQ ID NO: 7621; WAN024BWU; Start 129; Stop 153
gacagttggtttagacattcaatcc

SEQ ID NO: 472930 - DNA, 25 bp, Artificial
  probe
  misc_feature (1)..(25): SEQ ID NO: 7621; WAN024BWU; Start 136; Stop 160
ggtttagacattcaatcccgcaata

SEQ ID NO: 472931 - DNA, 25 bp, Artificial
  probe
  misc_feature (1)..(25): SEQ ID NO: 7621; WAN024BWU; Start 128; Stop 152
cgacagttggtttagacattcaatc

SEQ ID NO: 472932 - DNA, 25 bp, Artificial
  probe
  misc_feature (1)..(25): SEQ ID NO: 7621; WAN024BWU; Start 280; Stop 304
atcaaagaagaaggaactgtagaag

SEQ ID NO: 472933 - DNA, 25 bp, Artificial
  probe
  misc_feature (1)..(25): SEQ ID NO: 7622; WAN024BGG; Start 13; Stop 37
ttctcaaccttgcttctatccttag

SEQ ID NO: 472934 - DNA, 25 bp, Artificial
  probe
  misc_feature (1)..(25): SEQ ID NO: 7622; WAN024BGG; Start 7; Stop 31
aagatgttctcaaccttgcttctat

SEQ ID NO: 472935 - DNA, 25 bp, Artificial
  probe
  misc_feature (1)..(25): SEQ ID NO: 7622; WAN024BGG; Start 12; Stop 36
gttctcaaccttgcttctatcctta

SEQ ID NO: 472936 - DNA, 25 bp, Artificial
  probe
  misc_feature (1)..(25): SEQ ID NO: 7622; WAN024BGG; Start 8; Stop 32
agatgttctcaaccttgcttctatc

SEQ ID NO: 472937 - DNA, 25 bp, Artificial
  probe
  misc_feature (1)..(25): SEQ ID NO: 7622; WAN024BGG; Start 9; Stop 33
gatgttctcaaccttgcttctatcc

SEQ ID NO: 472938 - DNA, 25 bp, Artificial
  probe
  misc_feature (1)..(25): SEQ ID NO: 7622; WAN024BGG; Start 10; Stop 34
atgttctcaaccttgcttctatcct

SEQ ID NO: 472939 - DNA, 25 bp, Artificial
  probe
  misc_feature (1)..(25): SEQ ID NO: 7622; WAN024BGG; Start 11; Stop 35
tgttctcaaccttgcttctatcctt

SEQ ID NO: 472940 - DNA, 25 bp, Artificial
  probe
  misc_feature (1)..(25): SEQ ID NO: 7622; WAN024BGG; Start 15; Stop 39
ctcaaccttgcttctatccttagat

SEQ ID NO: 472941 - DNA, 25 bp, Artificial
  probe
  misc_feature (1)..(25): SEQ ID NO: 7622; WAN024BGG; Start 14; Stop 38
tctcaaccttgcttctatccttaga

SEQ ID NO: 472942 - DNA, 25 bp, Artificial
  probe
  misc_feature (1)..(25): SEQ ID NO: 7622; WAN024BGG; Start 16; Stop 40
tcaaccttgcttctatccttagata

SEQ ID NO: 472943 - DNA, 25 bp, Artificial
  probe
  misc_feature (1)..(25): SEQ ID NO: 7622; WAN024BGG; Start 30; Stop 54
atccttagatagtgcatggttacag

SEQ ID NO: 472944 - DNA, 25 bp, Artificial
  probe
  misc_feature (1)..(25): SEQ ID NO: 7622; WAN024BGG; Start 6; Stop 30
aaagatgttctcaaccttgcttcta

SEQ ID NO: 472945 - DNA, 25 bp, Artificial
  probe
  misc_feature (1)..(25): SEQ ID NO: 7622; WAN024BGG; Start 34; Stop 58
ttagatagtgcatggttacaggctt

SEQ ID NO: 472946 - DNA, 25 bp, Artificial
  probe
  misc_feature (1)..(25): SEQ ID NO: 7622; WAN024BGG; Start 43; Stop 67
gcatggttacaggctttatctttag

SEQ ID NO: 472947 - DNA, 25 bp, Artificial
  probe
  misc_feature (1)..(25): SEQ ID NO: 7622; WAN024BGG; Start 29; Stop 53
tatccttagatagtgcatggttaca

SEQ ID NO: 472948 - DNA, 25 bp, Artificial
  probe
  misc_feature (1)..(25): SEQ ID NO: 7622; WAN024BGG; Start 33; Stop 57
cttagatagtgcatggttacaggct

SEQ ID NO: 472949 - DNA, 25 bp, Artificial
  probe
  misc_feature (1)..(25): SEQ ID NO: 7622; WAN024BGG; Start 5; Stop 29
caaagatgttctcaaccttgcttct

SEQ ID NO: 472950 - DNA, 25 bp, Artificial
  probe
  misc_feature (1)..(25): SEQ ID NO: 7622; WAN024BGG; Start 31; Stop 55
tccttagatagtgcatggttacagg

SEQ ID NO: 472951 - DNA, 25 bp, Artificial
  probe
  misc_feature (1)..(25): SEQ ID NO: 7622; WAN024BGG; Start 42; Stop 66
tgcatggttacaggctttatcttta

SEQ ID NO: 472952 - DNA, 25 bp, Artificial
  probe
  misc_feature (1)..(25): SEQ ID NO: 7622; WAN024BGG; Start 38; Stop 62
atagtgcatggttacaggctttatc

SEQ ID NO: 472953 - DNA, 25 bp, Artificial
  probe
  misc_feature (1)..(25): SEQ ID NO: 7622; WAN024BGG; Start 37; Stop 61
gatagtgcatggttacaggctttat

SEQ ID NO: 472954 - DNA, 25 bp, Artificial
  probe
  misc_feature (1)..(25): SEQ ID NO: 7622; WAN024BGG; Start 39; Stop 63
tagtgcatggttacaggctttatct

SEQ ID NO: 472955 - DNA, 25 bp, Artificial
  probe
  misc_feature (1)..(25): SEQ ID NO: 7622; WAN024BGG; Start 36; Stop 60
agatagtgcatggttacaggcttta

SEQ ID NO: 472956 - DNA, 25 bp, Artificial
  probe
  misc_feature (1)..(25): SEQ ID NO: 7622; WAN024BGG; Start 35; Stop 59
tagatagtgcatggttacaggcttt

SEQ ID NO: 472957 - DNA, 25 bp, Artificial
  probe
  misc_feature (1)..(25): SEQ ID NO: 7622; WAN024BGG; Start 41; Stop 65
gtgcatggttacaggctttatcttt

SEQ ID NO: 472958 - DNA, 25 bp, Artificial
  probe
  misc_feature (1)..(25): SEQ ID NO: 7622; WAN024BGG; Start 44; Stop 68
catggttacaggctttatctttagc

SEQ ID NO: 472959 - DNA, 25 bp, Artificial
  probe
  misc_feature (1)..(25): SEQ ID NO: 7622; WAN024BGG; Start 32; Stop 56
ccttagatagtgcatggttacaggc

SEQ ID NO: 472960 - DNA, 25 bp, Artificial
  probe
  misc_feature (1)..(25): SEQ ID NO: 7622; WAN024BGG; Start 40; Stop 64
agtgcatggttacaggctttatctt

SEQ ID NO: 472961 - DNA, 25 bp, Artificial
  probe
  misc_feature (1)..(25): SEQ ID NO: 7622; WAN024BGG; Start 58; Stop 82
ttatctttagctgttagcggattga

SEQ ID NO: 472962 - DNA, 25 bp, Artificial
  probe
  misc_feature (1)..(25): SEQ ID NO: 7622; WAN024BGG; Start 45; Stop 69
atggttacaggctttatctttagct

SEQ ID NO: 472963 - DNA, 25 bp, Artificial
  probe
  misc_feature (1)..(25): SEQ ID NO: 7622; WAN024BGG; Start 59; Stop 83
tatctttagctgttagcggattgag

SEQ ID NO: 472964 - DNA, 25 bp, Artificial
  probe
  misc_feature (1)..(25): SEQ ID NO: 7622; WAN024BGG; Start 57; Stop 81
tttatctttagctgttagcggattg

SEQ ID NO: 472965 - DNA, 25 bp, Artificial
  probe
  misc_feature (1)..(25): SEQ ID NO: 7622; WAN024BGG; Start 20; Stop 44
ccttgcttctatccttagatagtgc

SEQ ID NO: 472966 - DNA, 25 bp, Artificial
  probe
  misc_feature (1)..(25): SEQ ID NO: 7623; WAN024C4H; Start 9; Stop 33
gccaactgagcttgattttacttat

SEQ ID NO: 472967 - DNA, 25 bp, Artificial
  probe
  misc_feature (1)..(25): SEQ ID NO: 7623; WAN024C4H; Start 8; Stop 32
tgccaactgagcttgattttactta

SEQ ID NO: 472968 - DNA, 25 bp, Artificial
  probe
  misc_feature (1)..(25): SEQ ID NO: 7623; WAN024C4H; Start 7; Stop 31
ctgccaactgagcttgattttactt

SEQ ID NO: 472969 - DNA, 25 bp, Artificial
  probe
  misc_feature (1)..(25): SEQ ID NO: 7623; WAN024C4H; Start 5; Stop 29
cactgccaactgagcttgattttac

SEQ ID NO: 472970 - DNA, 25 bp, Artificial
  probe
  misc_feature (1)..(25): SEQ ID NO: 7623; WAN024C4H; Start 10; Stop 34
ccaactgagcttgattttacttata

SEQ ID NO: 472971 - DNA, 25 bp, Artificial
  probe
  misc_feature (1)..(25): SEQ ID NO: 7623; WAN024C4H; Start 6; Stop 30
actgccaactgagcttgattttact

SEQ ID NO: 472972 - DNA, 25 bp, Artificial
  probe
  misc_feature (1)..(25): SEQ ID NO: 7623; WAN024C4H; Start 4; Stop 28
gcactgccaactgagcttgatttta

SEQ ID NO: 472973 - DNA, 25 bp, Artificial
  probe
  misc_feature (1)..(25): SEQ ID NO: 7623; WAN024C4H; Start 11; Stop 35
caactgagcttgattttacttatat

SEQ ID NO: 472974 - DNA, 25 bp, Artificial
  probe
  misc_feature (1)..(25): SEQ ID NO: 7624; WAN024CZ3; Start 17; Stop 41
tatcaagcagaatatccatgttagc

SEQ ID NO: 472975 - DNA, 25 bp, Artificial
  probe
  misc_feature (1)..(25): SEQ ID NO: 7624; WAN024CZ3; Start 18; Stop 42
atcaagcagaatatccatgttagcg

SEQ ID NO: 472976 - DNA, 25 bp, Artificial
  probe
  misc_feature (1)..(25): SEQ ID NO: 7624; WAN024CZ3; Start 20; Stop 44
caagcagaatatccatgttagcgtc

SEQ ID NO: 472977 - DNA, 25 bp, Artificial
  probe
  misc_feature (1)..(25): SEQ ID NO: 7624; WAN024CZ3; Start 22; Stop 46
agcagaatatccatgttagcgtctt

SEQ ID NO: 472978 - DNA, 25 bp, Artificial
  probe
  misc_feature (1)..(25): SEQ ID NO: 7624; WAN024CZ3; Start 21; Stop 45
aagcagaatatccatgttagcgtct

SEQ ID NO: 472979 - DNA, 25 bp, Artificial
  probe
  misc_feature (1)..(25): SEQ ID NO: 7624; WAN024CZ3; Start 19; Stop 43
tcaagcagaatatccatgttagcgt

SEQ ID NO: 472980 - DNA, 25 bp, Artificial
  probe
  misc_feature (1)..(25): SEQ ID NO: 7624; WAN024CZ3; Start 5; Stop 29
caggtgagaagatatcaagcagaat

SEQ ID NO: 472981 - DNA, 25 bp, Artificial
  probe
  misc_feature (1)..(25): SEQ ID NO: 7624; WAN024CZ3; Start 6; Stop 30
aggtgagaagatatcaagcagaata

SEQ ID NO: 472982 - DNA, 25 bp, Artificial
  probe
  misc_feature (1)..(25): SEQ ID NO: 7624; WAN024CZ3; Start 7; Stop 31
ggtgagaagatatcaagcagaatat

SEQ ID NO: 472983 - DNA, 25 bp, Artificial
  probe
  misc_feature (1)..(25): SEQ ID NO: 7624; WAN024CZ3; Start 23; Stop 47
gcagaatatccatgttagcgtcttt

SEQ ID NO: 472984 - DNA, 25 bp, Artificial
  probe
  misc_feature (1)..(25): SEQ ID NO: 7624; WAN024CZ3; Start 16; Stop 40
atatcaagcagaatatccatgttag

SEQ ID NO: 472985 - DNA, 25 bp, Artificial
  probe
  misc_feature (1)..(25): SEQ ID NO: 7624; WAN024CZ3; Start 114; Stop 138
gatttggactgaatctttggagatg

SEQ ID NO: 472986 - DNA, 25 bp, Artificial
  probe
  misc_feature (1)..(25): SEQ ID NO: 7624; WAN024CZ3; Start 115; Stop 139
atttggactgaatctttggagatgt

SEQ ID NO: 472987 - DNA, 25 bp, Artificial
  probe
  misc_feature (1)..(25): SEQ ID NO: 7624; WAN024CZ3; Start 4; Stop 28
gcaggtgagaagatatcaagcagaa

SEQ ID NO: 472988 - DNA, 25 bp, Artificial
  probe
  misc_feature (1)..(25): SEQ ID NO: 7624; WAN024CZ3; Start 116; Stop 140
tttggactgaatctttggagatgtc

SEQ ID NO: 472989 - DNA, 25 bp, Artificial
  probe
  misc_feature (1)..(25): SEQ ID NO: 7624; WAN024CZ3; Start 113; Stop 137
cgatttggactgaatctttggagat

SEQ ID NO: 472990 - DNA, 25 bp, Artificial
  probe
  misc_feature (1)..(25): SEQ ID NO: 7624; WAN024CZ3; Start 119; Stop 143
ggactgaatctttggagatgtcaaa

SEQ ID NO: 472991 - DNA, 25 bp, Artificial
  probe
  misc_feature (1)..(25): SEQ ID NO: 7624; WAN024CZ3; Start 37; Stop 61
ttagcgtcttttataggaagtcgtg

SEQ ID NO: 472992 - DNA, 25 bp, Artificial
  probe
  misc_feature (1)..(25): SEQ ID NO: 7624; WAN024CZ3; Start 36; Stop 60
gttagcgtcttttataggaagtcgt

SEQ ID NO: 472993 - DNA, 25 bp, Artificial
  probe
  misc_feature (1)..(25): SEQ ID NO: 7624; WAN024CZ3; Start 35; Stop 59
tgttagcgtcttttataggaagtcg

SEQ ID NO: 472994 - DNA, 25 bp, Artificial
  probe
  misc_feature (1)..(25): SEQ ID NO: 7624; WAN024CZ3; Start 118; Stop 142
tggactgaatctttggagatgtcaa

SEQ ID NO: 472995 - DNA, 25 bp, Artificial
  probe
  misc_feature (1)..(25): SEQ ID NO: 7624; WAN024CZ3; Start 117; Stop 141
ttggactgaatctttggagatgtca

SEQ ID NO: 472996 - DNA, 25 bp, Artificial
  probe
  misc_feature (1)..(25): SEQ ID NO: 7624; WAN024CZ3; Start 34; Stop 58
atgttagcgtcttttataggaagtc

SEQ ID NO: 472997 - DNA, 25 bp, Artificial
  probe
  misc_feature (1)..(25): SEQ ID NO: 7624; WAN024CZ3; Start 107; Stop 131
tagcagcgatttggactgaatcttt

SEQ ID NO: 472998 - DNA, 25 bp, Artificial
  probe
  misc_feature (1)..(25): SEQ ID NO: 7624; WAN024CZ3; Start 106; Stop 130
ttagcagcgatttggactgaatctt

SEQ ID NO: 472999 - DNA, 25 bp, Artificial
  probe
  misc_feature (1)..(25): SEQ ID NO: 7624; WAN024CZ3; Start 105; Stop 129
tttagcagcgatttggactgaatct

SEQ ID NO: 473000 - DNA, 25 bp, Artificial
  probe
  misc_feature (1)..(25): SEQ ID NO: 7624; WAN024CZ3; Start 44; Stop 68
cttttataggaagtcgtgccaagtc

SEQ ID NO: 473001 - DNA, 25 bp, Artificial
  probe
  misc_feature (1)..(25): SEQ ID NO: 7624; WAN024CZ3; Start 42; Stop 66
gtcttttataggaagtcgtgccaag

SEQ ID NO: 473002 - DNA, 25 bp, Artificial
  probe
  misc_feature (1)..(25): SEQ ID NO: 7624; WAN024CZ3; Start 32; Stop 56
ccatgttagcgtcttttataggaag

SEQ ID NO: 473003 - DNA, 25 bp, Artificial
  probe
  misc_feature (1)..(25): SEQ ID NO: 7624; WAN024CZ3; Start 43; Stop 67
tcttttataggaagtcgtgccaagt

SEQ ID NO: 473004 - DNA, 25 bp, Artificial
  probe
  misc_feature (1)..(25): SEQ ID NO: 7624; WAN024CZ3; Start 24; Stop 48
cagaatatccatgttagcgtctttt

SEQ ID NO: 473005 - DNA, 25 bp, Artificial
  probe
  misc_feature (1)..(25): SEQ ID NO: 7624; WAN024CZ3; Start 10; Stop 34
gagaagatatcaagcagaatatcca

SEQ ID NO: 473006 - DNA, 25 bp, Artificial
  probe
  misc_feature (1)..(25): SEQ ID NO: 7624; WAN024CZ3; Start 9; Stop 33
tgagaagatatcaagcagaatatcc

SEQ ID NO: 473007 - DNA, 25 bp, Artificial
  probe
  misc_feature (1)..(25): SEQ ID NO: 7625; WAN024EUG; Start 66; Stop 90
aggagttgatagagttcgtagtgaa

SEQ ID NO: 473008 - DNA, 25 bp, Artificial
  probe
  misc_feature (1)..(25): SEQ ID NO: 7625; WAN024EUG; Start 65; Stop 89
caggagttgatagagttcgtagtga

SEQ ID NO: 473009 - DNA, 25 bp, Artificial
  probe
  misc_feature (1)..(25): SEQ ID NO: 7625; WAN024EUG; Start 62; Stop 86
gagcaggagttgatagagttcgtag

SEQ ID NO: 473010 - DNA, 25 bp, Artificial
  probe
  misc_feature (1)..(25): SEQ ID NO: 7625; WAN024EUG; Start 61; Stop 85
agagcaggagttgatagagttcgta

SEQ ID NO: 473011 - DNA, 25 bp, Artificial
  probe
  misc_feature (1)..(25): SEQ ID NO: 7625; WAN024EUG; Start 64; Stop 88
gcaggagttgatagagttcgtagtg

SEQ ID NO: 473012 - DNA, 25 bp, Artificial
  probe
  misc_feature (1)..(25): SEQ ID NO: 7625; WAN024EUG; Start 63; Stop 87
agcaggagttgatagagttcgtagt

SEQ ID NO: 473013 - DNA, 25 bp, Artificial
  probe
  misc_feature (1)..(25): SEQ ID NO: 7625; WAN024EUG; Start 54; Stop 78
aaatgaaagagcaggagttgataga

SEQ ID NO: 473014 - DNA, 25 bp, Artificial
  probe
  misc_feature (1)..(25): SEQ ID NO: 7625; WAN024EUG; Start 55; Stop 79
aatgaaagagcaggagttgatagag

SEQ ID NO: 473015 - DNA, 25 bp, Artificial
  probe
  misc_feature (1)..(25): SEQ ID NO: 7625; WAN024EUG; Start 94; Stop 118
gtaatccctcagagtaagaaagcag

SEQ ID NO: 473016 - DNA, 25 bp, Artificial
  probe
  misc_feature (1)..(25): SEQ ID NO: 7625; WAN024EUG; Start 56; Stop 80
atgaaagagcaggagttgatagagt

SEQ ID NO: 473017 - DNA, 25 bp, Artificial
  probe
  misc_feature (1)..(25): SEQ ID NO: 7625; WAN024EUG; Start 58; Stop 82
gaaagagcaggagttgatagagttc

SEQ ID NO: 473018 - DNA, 25 bp, Artificial
  probe
  misc_feature (1)..(25): SEQ ID NO: 7625; WAN024EUG; Start 93; Stop 117
tgtaatccctcagagtaagaaagca

SEQ ID NO: 473019 - DNA, 25 bp, Artificial
  probe
  misc_feature (1)..(25): SEQ ID NO: 7625; WAN024EUG; Start 57; Stop 81
tgaaagagcaggagttgatagagtt

SEQ ID NO: 473020 - DNA, 25 bp, Artificial
  probe
  misc_feature (1)..(25): SEQ ID NO: 7625; WAN024EUG; Start 10; Stop 34
cttgctcaatcaatccaaagaaatg

SEQ ID NO: 473021 - DNA, 25 bp, Artificial
  probe
  misc_feature (1)..(25): SEQ ID NO: 7625; WAN024EUG; Start 60; Stop 84
aagagcaggagttgatagagttcgt

SEQ ID NO: 473022 - DNA, 25 bp, Artificial
  probe
  misc_feature (1)..(25): SEQ ID NO: 7625; WAN024EUG; Start 5; Stop 29
cagttcttgctcaatcaatccaaag

SEQ ID NO: 473023 - DNA, 25 bp, Artificial
  probe
  misc_feature (1)..(25): SEQ ID NO: 7625; WAN024EUG; Start 91; Stop 115
cctgtaatccctcagagtaagaaag

SEQ ID NO: 473024 - DNA, 25 bp, Artificial
  probe
  misc_feature (1)..(25): SEQ ID NO: 7625; WAN024EUG; Start 90; Stop 114
acctgtaatccctcagagtaagaaa

SEQ ID NO: 473025 - DNA, 25 bp, Artificial
  probe
  misc_feature (1)..(25): SEQ ID NO: 7625; WAN024EUG; Start 89; Stop 113
aacctgtaatccctcagagtaagaa

SEQ ID NO: 473026 - DNA, 25 bp, Artificial
  probe
  misc_feature (1)..(25): SEQ ID NO: 7625; WAN024EUG; Start 92; Stop 116
ctgtaatccctcagagtaagaaagc

SEQ ID NO: 473027 - DNA, 25 bp, Artificial
  probe
  misc_feature (1)..(25): SEQ ID NO: 7625; WAN024EUG; Start 95; Stop 119
taatccctcagagtaagaaagcagc

SEQ ID NO: 473028 - DNA, 25 bp, Artificial
  probe
  misc_feature (1)..(25): SEQ ID NO: 7625; WAN024EUG; Start 88; Stop 112
gaacctgtaatccctcagagtaaga

SEQ ID NO: 473029 - DNA, 25 bp, Artificial
  probe
  misc_feature (1)..(25): SEQ ID NO: 7625; WAN024EUG; Start 59; Stop 83
aaagagcaggagttgatagagttcg

SEQ ID NO: 473030 - DNA, 25 bp, Artificial
  probe
  misc_feature (1)..(25): SEQ ID NO: 7625; WAN024EUG; Start 87; Stop 111
tgaacctgtaatccctcagagtaag

SEQ ID NO: 473031 - DNA, 25 bp, Artificial
  probe
  misc_feature (1)..(25): SEQ ID NO: 7625; WAN024EUG; Start 86; Stop 110
gtgaacctgtaatccctcagagtaa

SEQ ID NO: 473032 - DNA, 25 bp, Artificial
  probe
  misc_feature (1)..(25): SEQ ID NO: 7625; WAN024EUG; Start 11; Stop 35
ttgctcaatcaatccaaagaaatgg

SEQ ID NO: 473033 - DNA, 25 bp, Artificial
  probe
  misc_feature (1)..(25): SEQ ID NO: 7625; WAN024EUG; Start 14; Stop 38
ctcaatcaatccaaagaaatggtcg

SEQ ID NO: 473034 - DNA, 25 bp, Artificial
  probe
  misc_feature (1)..(25): SEQ ID NO: 7625; WAN024EUG; Start 83; Stop 107
gtagtgaacctgtaatccctcagag

SEQ ID NO: 473035 - DNA, 25 bp, Artificial
  probe
  misc_feature (1)..(25): SEQ ID NO: 7625; WAN024EUG; Start 13; Stop 37
gctcaatcaatccaaagaaatggtc

SEQ ID NO: 473036 - DNA, 25 bp, Artificial
  probe
  misc_feature (1)..(25): SEQ ID NO: 7625; WAN024EUG; Start 109; Stop 133
aagaaagcagcttatctcgtacttc

SEQ ID NO: 473037 - DNA, 25 bp, Artificial
  probe
  misc_feature (1)..(25): SEQ ID NO: 7625; WAN024EUG; Start 85; Stop 109
agtgaacctgtaatccctcagagta

SEQ ID NO: 473038 - DNA, 25 bp, Artificial
  probe
  misc_feature (1)..(25): SEQ ID NO: 7625; WAN024EUG; Start 84; Stop 108
tagtgaacctgtaatccctcagagt

SEQ ID NO: 473039 - DNA, 25 bp, Artificial
  probe
  misc_feature (1)..(25): SEQ ID NO: 7625; WAN024EUG; Start 12; Stop 36
tgctcaatcaatccaaagaaatggt

SEQ ID NO: 473040 - DNA, 25 bp, Artificial
  probe
  misc_feature (1)..(25): SEQ ID NO: 7626; WAN024B9F; Start 207; Stop 231
gattgaagagagtagtgtgcttgaa

SEQ ID NO: 473041 - DNA, 25 bp, Artificial
  probe
  misc_feature (1)..(25): SEQ ID NO: 7626; WAN024B9F; Start 205; Stop 229
ttgattgaagagagtagtgtgcttg

SEQ ID NO: 473042 - DNA, 25 bp, Artificial
  probe
  misc_feature (1)..(25): SEQ ID NO: 7626; WAN024B9F; Start 206; Stop 230
tgattgaagagagtagtgtgcttga

SEQ ID NO: 473043 - DNA, 25 bp, Artificial
  probe
  misc_feature (1)..(25): SEQ ID NO: 7626; WAN024B9F; Start 118; Stop 142
ttaggcttgactgttgtcctgatta

SEQ ID NO: 473044 - DNA, 25 bp, Artificial
  probe
  misc_feature (1)..(25): SEQ ID NO: 7626; WAN024B9F; Start 203; Stop 227
atttgattgaagagagtagtgtgct

SEQ ID NO: 473045 - DNA, 25 bp, Artificial
  probe
  misc_feature (1)..(25): SEQ ID NO: 7626; WAN024B9F; Start 202; Stop 226
catttgattgaagagagtagtgtgc

SEQ ID NO: 473046 - DNA, 25 bp, Artificial
  probe
  misc_feature (1)..(25): SEQ ID NO: 7626; WAN024B9F; Start 201; Stop 225
gcatttgattgaagagagtagtgtg

SEQ ID NO: 473047 - DNA, 25 bp, Artificial
  probe
  misc_feature (1)..(25): SEQ ID NO: 7626; WAN024B9F; Start 197; Stop 221
atgggcatttgattgaagagagtag

SEQ ID NO: 473048 - DNA, 25 bp, Artificial
  probe
  misc_feature (1)..(25): SEQ ID NO: 7626; WAN024B9F; Start 196; Stop 220
gatgggcatttgattgaagagagta

SEQ ID NO: 473049 - DNA, 25 bp, Artificial
  probe
  misc_feature (1)..(25): SEQ ID NO: 7626; WAN024B9F; Start 209; Stop 233
ttgaagagagtagtgtgcttgaaat

SEQ ID NO: 473050 - DNA, 25 bp, Artificial
  probe
  misc_feature (1)..(25): SEQ ID NO: 7626; WAN024B9F; Start 208; Stop 232
attgaagagagtagtgtgcttgaaa

SEQ ID NO: 473051 - DNA, 25 bp, Artificial
  probe
  misc_feature (1)..(25): SEQ ID NO: 7626; WAN024B9F; Start 204; Stop 228
tttgattgaagagagtagtgtgctt

SEQ ID NO: 473052 - DNA, 25 bp, Artificial
  probe
  misc_feature (1)..(25): SEQ ID NO: 7626; WAN024B9F; Start 200; Stop 224
ggcatttgattgaagagagtagtgt

SEQ ID NO: 473053 - DNA, 25 bp, Artificial
  probe
  misc_feature (1)..(25): SEQ ID NO: 7626; WAN024B9F; Start 229; Stop 253
gaaatcttctcagaccctaaacaac

SEQ ID NO: 473054 - DNA, 25 bp, Artificial
  probe
  misc_feature (1)..(25): SEQ ID NO: 7626; WAN024B9F; Start 214; Stop 238
gagagtagtgtgcttgaaatcttct

SEQ ID NO: 473055 - DNA, 25 bp, Artificial
  probe
  misc_feature (1)..(25): SEQ ID NO: 7626; WAN024B9F; Start 213; Stop 237
agagagtagtgtgcttgaaatcttc

SEQ ID NO: 473056 - DNA, 25 bp, Artificial
  probe
  misc_feature (1)..(25): SEQ ID NO: 7626; WAN024B9F; Start 211; Stop 235
gaagagagtagtgtgcttgaaatct

SEQ ID NO: 473057 - DNA, 25 bp, Artificial
  probe
  misc_feature (1)..(25): SEQ ID NO: 7626; WAN024B9F; Start 210; Stop 234
tgaagagagtagtgtgcttgaaatc

SEQ ID NO: 473058 - DNA, 25 bp, Artificial
  probe
  misc_feature (1)..(25): SEQ ID NO: 7626; WAN024B9F; Start 117; Stop 141
attaggcttgactgttgtcctgatt

SEQ ID NO: 473059 - DNA, 25 bp, Artificial
  probe
  misc_feature (1)..(25): SEQ ID NO: 7626; WAN024B9F; Start 116; Stop 140
aattaggcttgactgttgtcctgat

SEQ ID NO: 473060 - DNA, 25 bp, Artificial
  probe
  misc_feature (1)..(25): SEQ ID NO: 7626; WAN024B9F; Start 230; Stop 254
aaatcttctcagaccctaaacaacc

SEQ ID NO: 473061 - DNA, 25 bp, Artificial
  probe
  misc_feature (1)..(25): SEQ ID NO: 7626; WAN024B9F; Start 119; Stop 143
taggcttgactgttgtcctgattac

SEQ ID NO: 473062 - DNA, 25 bp, Artificial
  probe
  misc_feature (1)..(25): SEQ ID NO: 7626; WAN024B9F; Start 228; Stop 252
tgaaatcttctcagaccctaaacaa

SEQ ID NO: 473063 - DNA, 25 bp, Artificial
  probe
  misc_feature (1)..(25): SEQ ID NO: 7626; WAN024B9F; Start 227; Stop 251
ttgaaatcttctcagaccctaaaca

SEQ ID NO: 473064 - DNA, 25 bp, Artificial
  probe
  misc_feature (1)..(25): SEQ ID NO: 7626; WAN024B9F; Start 199; Stop 223
gggcatttgattgaagagagtagtg

SEQ ID NO: 473065 - DNA, 25 bp, Artificial
  probe
  misc_feature (1)..(25): SEQ ID NO: 7626; WAN024B9F; Start 226; Stop 250
cttgaaatcttctcagaccctaaac

SEQ ID NO: 473066 - DNA, 25 bp, Artificial
  probe
  misc_feature (1)..(25): SEQ ID NO: 7626; WAN024B9F; Start 225; Stop 249
gcttgaaatcttctcagaccctaaa

SEQ ID NO: 473067 - DNA, 25 bp, Artificial
  probe
  misc_feature (1)..(25): SEQ ID NO: 7626; WAN024B9F; Start 219; Stop 243
tagtgtgcttgaaatcttctcagac

SEQ ID NO: 473068 - DNA, 25 bp, Artificial
  probe
  misc_feature (1)..(25): SEQ ID NO: 7626; WAN024B9F; Start 218; Stop 242
gtagtgtgcttgaaatcttctcaga

SEQ ID NO: 473069 - DNA, 25 bp, Artificial
  probe
  misc_feature (1)..(25): SEQ ID NO: 7626; WAN024B9F; Start 217; Stop 241
agtagtgtgcttgaaatcttctcag

SEQ ID NO: 473070 - DNA, 25 bp, Artificial
  probe
  misc_feature (1)..(25): SEQ ID NO: 7626; WAN024B9F; Start 232; Stop 256
atcttctcagaccctaaacaacctt

SEQ ID NO: 473071 - DNA, 25 bp, Artificial
  probe
  misc_feature (1)..(25): SEQ ID NO: 7626; WAN024B9F; Start 231; Stop 255
aatcttctcagaccctaaacaacct

SEQ ID NO: 473072 - DNA, 25 bp, Artificial
  probe
  misc_feature (1)..(25): SEQ ID NO: 7626; WAN024B9F; Start 215; Stop 239
agagtagtgtgcttgaaatcttctc

SEQ ID NO: 473073 - DNA, 25 bp, Artificial
  probe
  misc_feature (1)..(25): SEQ ID NO: 7627; WAN024G2R; Start 111; Stop 135
cattaaccttaactgccgaatacat

SEQ ID NO: 473074 - DNA, 25 bp, Artificial
  probe
  misc_feature (1)..(25): SEQ ID NO: 7627; WAN024G2R; Start 108; Stop 132
gaccattaaccttaactgccgaata

SEQ ID NO: 473075 - DNA, 25 bp, Artificial
  probe
  misc_feature (1)..(25): SEQ ID NO: 7627; WAN024G2R; Start 110; Stop 134
ccattaaccttaactgccgaataca

SEQ ID NO: 473076 - DNA, 25 bp, Artificial
  probe
  misc_feature (1)..(25): SEQ ID NO: 7627; WAN024G2R; Start 109; Stop 133
accattaaccttaactgccgaatac

SEQ ID NO: 473077 - DNA, 25 bp, Artificial
  probe
  misc_feature (1)..(25): SEQ ID NO: 7627; WAN024G2R; Start 113; Stop 137
ttaaccttaactgccgaatacatag

SEQ ID NO: 473078 - DNA, 25 bp, Artificial
  probe
  misc_feature (1)..(25): SEQ ID NO: 7627; WAN024G2R; Start 112; Stop 136
attaaccttaactgccgaatacata

SEQ ID NO: 473079 - DNA, 25 bp, Artificial
  probe
  misc_feature (1)..(25): SEQ ID NO: 7627; WAN024G2R; Start 114; Stop 138
taaccttaactgccgaatacatagg

SEQ ID NO: 473080 - DNA, 25 bp, Artificial
  probe
  misc_feature (1)..(25): SEQ ID NO: 7627; WAN024G2R; Start 5; Stop 29
ccatcataagaaatcggacttgttc

SEQ ID NO: 473081 - DNA, 25 bp, Artificial
  probe
  misc_feature (1)..(25): SEQ ID NO: 7627; WAN024G2R; Start 6; Stop 30
catcataagaaatcggacttgttcg

SEQ ID NO: 473082 - DNA, 25 bp, Artificial
  probe
  misc_feature (1)..(25): SEQ ID NO: 7627; WAN024G2R; Start 97; Stop 121
atagagcttgcgaccattaacctta

SEQ ID NO: 473083 - DNA, 25 bp, Artificial
  probe
  misc_feature (1)..(25): SEQ ID NO: 7627; WAN024G2R; Start 98; Stop 122
tagagcttgcgaccattaaccttaa

SEQ ID NO: 473084 - DNA, 25 bp, Artificial
  probe
  misc_feature (1)..(25): SEQ ID NO: 7627; WAN024G2R; Start 91; Stop 115
atactcatagagcttgcgaccatta

SEQ ID NO: 473085 - DNA, 25 bp, Artificial
  probe
  misc_feature (1)..(25): SEQ ID NO: 7627; WAN024G2R; Start 92; Stop 116
tactcatagagcttgcgaccattaa

SEQ ID NO: 473086 - DNA, 25 bp, Artificial
  probe
  misc_feature (1)..(25): SEQ ID NO: 7627; WAN024G2R; Start 4; Stop 28
gccatcataagaaatcggacttgtt

SEQ ID NO: 473087 - DNA, 25 bp, Artificial
  probe
  misc_feature (1)..(25): SEQ ID NO: 7627; WAN024G2R; Start 7; Stop 31
atcataagaaatcggacttgttcgc

SEQ ID NO: 473088 - DNA, 25 bp, Artificial
  probe
  misc_feature (1)..(25): SEQ ID NO: 7627; WAN024G2R; Start 107; Stop 131
cgaccattaaccttaactgccgaat

SEQ ID NO: 473089 - DNA, 25 bp, Artificial
  probe
  misc_feature (1)..(25): SEQ ID NO: 7627; WAN024G2R; Start 24; Stop 48
ttgttcgctcaaattgataaatggt

SEQ ID NO: 473090 - DNA, 25 bp, Artificial
  probe
  misc_feature (1)..(25): SEQ ID NO: 7627; WAN024G2R; Start 27; Stop 51
ttcgctcaaattgataaatggtcac

SEQ ID NO: 473091 - DNA, 25 bp, Artificial
  probe
  misc_feature (1)..(25): SEQ ID NO: 7627; WAN024G2R; Start 26; Stop 50
gttcgctcaaattgataaatggtca

SEQ ID NO: 473092 - DNA, 25 bp, Artificial
  probe
  misc_feature (1)..(25): SEQ ID NO: 7627; WAN024G2R; Start 25; Stop 49
tgttcgctcaaattgataaatggtc

SEQ ID NO: 473093 - DNA, 25 bp, Artificial
  probe
  misc_feature (1)..(25): SEQ ID NO: 7627; WAN024G2R; Start 23; Stop 47
cttgttcgctcaaattgataaatgg

SEQ ID NO: 473094 - DNA, 25 bp, Artificial
  probe
  misc_feature (1)..(25): SEQ ID NO: 7627; WAN024G2R; Start 20; Stop 44
ggacttgttcgctcaaattgataaa

SEQ ID NO: 473095 - DNA, 25 bp, Artificial
  probe
  misc_feature (1)..(25): SEQ ID NO: 7627; WAN024G2R; Start 31; Stop 55
ctcaaattgataaatggtcacctga

SEQ ID NO: 473096 - DNA, 25 bp, Artificial
  probe
  misc_feature (1)..(25): SEQ ID NO: 7627; WAN024G2R; Start 30; Stop 54
gctcaaattgataaatggtcacctg

SEQ ID NO: 473097 - DNA, 25 bp, Artificial
  probe
  misc_feature (1)..(25): SEQ ID NO: 7627; WAN024G2R; Start 22; Stop 46
acttgttcgctcaaattgataaatg

SEQ ID NO: 473098 - DNA, 25 bp, Artificial
  probe
  misc_feature (1)..(25): SEQ ID NO: 7627; WAN024G2R; Start 240; Stop 264
tagcatcctcagtcttcgtggaata

SEQ ID NO: 473099 - DNA, 25 bp, Artificial
  probe
  misc_feature (1)..(25): SEQ ID NO: 7627; WAN024G2R; Start 21; Stop 45
gacttgttcgctcaaattgataaat

SEQ ID NO: 473100 - DNA, 25 bp, Artificial
  probe
  misc_feature (1)..(25): SEQ ID NO: 7627; WAN024G2R; Start 9; Stop 33
cataagaaatcggacttgttcgctc

SEQ ID NO: 473101 - DNA, 25 bp, Artificial
  probe
  misc_feature (1)..(25): SEQ ID NO: 7627; WAN024G2R; Start 10; Stop 34
ataagaaatcggacttgttcgctca

SEQ ID NO: 473102 - DNA, 25 bp, Artificial
  probe
  misc_feature (1)..(25): SEQ ID NO: 7627; WAN024G2R; Start 8; Stop 32
tcataagaaatcggacttgttcgct

SEQ ID NO: 473103 - DNA, 25 bp, Artificial
  probe
  misc_feature (1)..(25): SEQ ID NO: 7627; WAN024G2R; Start 96; Stop 120
catagagcttgcgaccattaacctt

SEQ ID NO: 473104 - DNA, 25 bp, Artificial
  probe
  misc_feature (1)..(25): SEQ ID NO: 7627; WAN024G2R; Start 90; Stop 114
catactcatagagcttgcgaccatt

SEQ ID NO: 473105 - DNA, 25 bp, Artificial
  probe
  misc_feature (1)..(25): SEQ ID NO: 7627; WAN024G2R; Start 29; Stop 53
cgctcaaattgataaatggtcacct

SEQ ID NO: 473106 - DNA, 25 bp, Artificial
  probe
  misc_feature (1)..(25): SEQ ID NO: 7628; WAN024BKO; Start 8; Stop 32
aatctcctttctacatctcgtttca

SEQ ID NO: 473107 - DNA, 25 bp, Artificial
  probe
  misc_feature (1)..(25): SEQ ID NO: 7628; WAN024BKO; Start 4; Stop 28
gctaaatctcctttctacatctcgt

SEQ ID NO: 473108 - DNA, 25 bp, Artificial
  probe
  misc_feature (1)..(25): SEQ ID NO: 7628; WAN024BKO; Start 2; Stop 26
tggctaaatctcctttctacatctc

SEQ ID NO: 473109 - DNA, 25 bp, Artificial
  probe
  misc_feature (1)..(25): SEQ ID NO: 7628; WAN024BKO; Start 9; Stop 33
atctcctttctacatctcgtttcac

SEQ ID NO: 473110 - DNA, 25 bp, Artificial
  probe
  misc_feature (1)..(25): SEQ ID NO: 7628; WAN024BKO; Start 1; Stop 25
ttggctaaatctcctttctacatct

SEQ ID NO: 473111 - DNA, 25 bp, Artificial
  probe
  misc_feature (1)..(25): SEQ ID NO: 7628; WAN024BKO; Start 3; Stop 27
ggctaaatctcctttctacatctcg

SEQ ID NO: 473112 - DNA, 25 bp, Artificial
  probe
  misc_feature (1)..(25): SEQ ID NO: 7628; WAN024BKO; Start 7; Stop 31
aaatctcctttctacatctcgtttc

SEQ ID NO: 473113 - DNA, 25 bp, Artificial
  probe
  misc_feature (1)..(25): SEQ ID NO: 7628; WAN024BKO; Start 13; Stop 37
cctttctacatctcgtttcaccaaa

SEQ ID NO: 473114 - DNA, 25 bp, Artificial
  probe
  misc_feature (1)..(25): SEQ ID NO: 7628; WAN024BKO; Start 5; Stop 29
ctaaatctcctttctacatctcgtt

SEQ ID NO: 473115 - DNA, 25 bp, Artificial
  probe
  misc_feature (1)..(25): SEQ ID NO: 7628; WAN024BKO; Start 12; Stop 36
tcctttctacatctcgtttcaccaa

SEQ ID NO: 473116 - DNA, 25 bp, Artificial
  probe
  misc_feature (1)..(25): SEQ ID NO: 7628; WAN024BKO; Start 10; Stop 34
tctcctttctacatctcgtttcacc

SEQ ID NO: 473117 - DNA, 25 bp, Artificial
  probe
  misc_feature (1)..(25): SEQ ID NO: 7628; WAN024BKO; Start 6; Stop 30
taaatctcctttctacatctcgttt

SEQ ID NO: 473118 - DNA, 25 bp, Artificial
  probe
  misc_feature (1)..(25): SEQ ID NO: 7628; WAN024BKO; Start 11; Stop 35
ctcctttctacatctcgtttcacca

SEQ ID NO: 473119 - DNA, 25 bp, Artificial
  probe
  misc_feature (1)..(25): SEQ ID NO: 7628; WAN024BKO; Start 14; Stop 38
ctttctacatctcgtttcaccaaaa

SEQ ID NO: 473120 - DNA, 25 bp, Artificial
  probe
  misc_feature (1)..(25): SEQ ID NO: 7629; WAN024F6F; Start 6; Stop 30
tagtcaggtggagtggttaatgtta

SEQ ID NO: 473121 - DNA, 25 bp, Artificial
  probe
  misc_feature (1)..(25): SEQ ID NO: 7629; WAN024F6F; Start 7; Stop 31
agtcaggtggagtggttaatgttaa

SEQ ID NO: 473122 - DNA, 25 bp, Artificial
  probe
  misc_feature (1)..(25): SEQ ID NO: 7629; WAN024F6F; Start 5; Stop 29
ctagtcaggtggagtggttaatgtt

SEQ ID NO: 473123 - DNA, 25 bp, Artificial
  probe
  misc_feature (1)..(25): SEQ ID NO: 7629; WAN024F6F; Start 11; Stop 35
aggtggagtggttaatgttaaagag

SEQ ID NO: 473124 - DNA, 25 bp, Artificial
  probe
  misc_feature (1)..(25): SEQ ID NO: 7629; WAN024F6F; Start 12; Stop 36
ggtggagtggttaatgttaaagagt

SEQ ID NO: 473125 - DNA, 25 bp, Artificial
  probe
  misc_feature (1)..(25): SEQ ID NO: 7629; WAN024F6F; Start 10; Stop 34
caggtggagtggttaatgttaaaga

SEQ ID NO: 473126 - DNA, 25 bp, Artificial
  probe
  misc_feature (1)..(25): SEQ ID NO: 7629; WAN024F6F; Start 9; Stop 33
tcaggtggagtggttaatgttaaag

SEQ ID NO: 473127 - DNA, 25 bp, Artificial
  probe
  misc_feature (1)..(25): SEQ ID NO: 7629; WAN024F6F; Start 8; Stop 32
gtcaggtggagtggttaatgttaaa

SEQ ID NO: 473128 - DNA, 25 bp, Artificial
  probe
  misc_feature (1)..(25): SEQ ID NO: 7629; WAN024F6F; Start 65; Stop 89
ggaaatcaaagagcaaactaggaag

SEQ ID NO: 473129 - DNA, 25 bp, Artificial
  probe
  misc_feature (1)..(25): SEQ ID NO: 7629; WAN024F6F; Start 66; Stop 90
gaaatcaaagagcaaactaggaagc

SEQ ID NO: 473130 - DNA, 25 bp, Artificial
  probe
  misc_feature (1)..(25): SEQ ID NO: 7629; WAN024F6F; Start 13; Stop 37
gtggagtggttaatgttaaagagta

SEQ ID NO: 473131 - DNA, 25 bp, Artificial
  probe
  misc_feature (1)..(25): SEQ ID NO: 7629; WAN024F6F; Start 55; Stop 79
catactcaatggaaatcaaagagca

SEQ ID NO: 473132 - DNA, 25 bp, Artificial
  probe
  misc_feature (1)..(25): SEQ ID NO: 7629; WAN024F6F; Start 54; Stop 78
tcatactcaatggaaatcaaagagc

SEQ ID NO: 473133 - DNA, 25 bp, Artificial
  probe
  misc_feature (1)..(25): SEQ ID NO: 7629; WAN024F6F; Start 49; Stop 73
tcttctcatactcaatggaaatcaa

SEQ ID NO: 473134 - DNA, 25 bp, Artificial
  probe
  misc_feature (1)..(25): SEQ ID NO: 7629; WAN024F6F; Start 48; Stop 72
ttcttctcatactcaatggaaatca

SEQ ID NO: 473135 - DNA, 25 bp, Artificial
  probe
  misc_feature (1)..(25): SEQ ID NO: 7629; WAN024F6F; Start 52; Stop 76
tctcatactcaatggaaatcaaaga

SEQ ID NO: 473136 - DNA, 25 bp, Artificial
  probe
  misc_feature (1)..(25): SEQ ID NO: 7629; WAN024F6F; Start 14; Stop 38
tggagtggttaatgttaaagagtat

SEQ ID NO: 473137 - DNA, 25 bp, Artificial
  probe
  misc_feature (1)..(25): SEQ ID NO: 7629; WAN024F6F; Start 53; Stop 77
ctcatactcaatggaaatcaaagag

SEQ ID NO: 473138 - DNA, 25 bp, Artificial
  probe
  misc_feature (1)..(25): SEQ ID NO: 7629; WAN024F6F; Start 51; Stop 75
ttctcatactcaatggaaatcaaag

SEQ ID NO: 473139 - DNA, 25 bp, Artificial
  probe
  misc_feature (1)..(25): SEQ ID NO: 7629; WAN024F6F; Start 50; Stop 74
cttctcatactcaatggaaatcaaa

SEQ ID NO: 473140 - DNA, 25 bp, Artificial
  probe
  misc_feature (1)..(25): SEQ ID NO: 7629; WAN024F6F; Start 16; Stop 40
gagtggttaatgttaaagagtatcc

SEQ ID NO: 473141 - DNA, 25 bp, Artificial
  probe
  misc_feature (1)..(25): SEQ ID NO: 7629; WAN024F6F; Start 15; Stop 39
ggagtggttaatgttaaagagtatc

SEQ ID NO: 473142 - DNA, 25 bp, Artificial
  probe
  misc_feature (1)..(25): SEQ ID NO: 7629; WAN024F6F; Start 4; Stop 28
gctagtcaggtggagtggttaatgt

SEQ ID NO: 473143 - DNA, 25 bp, Artificial
  probe
  misc_feature (1)..(25): SEQ ID NO: 7629; WAN024F6F; Start 38; Stop 62
tccactatatttcttctcatactca

SEQ ID NO: 473144 - DNA, 25 bp, Artificial
  probe
  misc_feature (1)..(25): SEQ ID NO: 7629; WAN024F6F; Start 19; Stop 43
tggttaatgttaaagagtatccact

SEQ ID NO: 473145 - DNA, 25 bp, Artificial
  probe
  misc_feature (1)..(25): SEQ ID NO: 7629; WAN024F6F; Start 17; Stop 41
agtggttaatgttaaagagtatcca

SEQ ID NO: 473146 - DNA, 25 bp, Artificial
  probe
  misc_feature (1)..(25): SEQ ID NO: 7629; WAN024F6F; Start 3; Stop 27
ggctagtcaggtggagtggttaatg

SEQ ID NO: 473147 - DNA, 25 bp, Artificial
  probe
  misc_feature (1)..(25): SEQ ID NO: 7629; WAN024F6F; Start 39; Stop 63
ccactatatttcttctcatactcaa

SEQ ID NO: 473148 - DNA, 25 bp, Artificial
  probe
  misc_feature (1)..(25): SEQ ID NO: 7629; WAN024F6F; Start 47; Stop 71
tttcttctcatactcaatggaaatc

SEQ ID NO: 473149 - DNA, 25 bp, Artificial
  probe
  misc_feature (1)..(25): SEQ ID NO: 7629; WAN024F6F; Start 32; Stop 56
agagtatccactatatttcttctca

SEQ ID NO: 473150 - DNA, 25 bp, Artificial
  probe
  misc_feature (1)..(25): SEQ ID NO: 7629; WAN024F6F; Start 20; Stop 44
ggttaatgttaaagagtatccacta

SEQ ID NO: 473151 - DNA, 25 bp, Artificial
  probe
  misc_feature (1)..(25): SEQ ID NO: 7629; WAN024F6F; Start 2; Stop 26
tggctagtcaggtggagtggttaat

SEQ ID NO: 473152 - DNA, 25 bp, Artificial
  probe
  misc_feature (1)..(25): SEQ ID NO: 7629; WAN024F6F; Start 1; Stop 25
ttggctagtcaggtggagtggttaa

SEQ ID NO: 473153 - DNA, 25 bp, Artificial
  probe
  misc_feature (1)..(25): SEQ ID NO: 7630; WAN024C2U; Start 10; Stop 34
ccaagtatcaatagagatgaggaca

SEQ ID NO: 473154 - DNA, 25 bp, Artificial
  probe
  misc_feature (1)..(25): SEQ ID NO: 7630; WAN024C2U; Start 143; Stop 167
atactggctccttctgctatcaatt

SEQ ID NO: 473155 - DNA, 25 bp, Artificial
  probe
  misc_feature (1)..(25): SEQ ID NO: 7630; WAN024C2U; Start 142; Stop 166
catactggctccttctgctatcaat

SEQ ID NO: 473156 - DNA, 25 bp, Artificial
  probe
  misc_feature (1)..(25): SEQ ID NO: 7630; WAN024C2U; Start 7; Stop 31
cttccaagtatcaatagagatgagg

SEQ ID NO: 473157 - DNA, 25 bp, Artificial
  probe
  misc_feature (1)..(25): SEQ ID NO: 7630; WAN024C2U; Start 9; Stop 33
tccaagtatcaatagagatgaggac

SEQ ID NO: 473158 - DNA, 25 bp, Artificial
  probe
  misc_feature (1)..(25): SEQ ID NO: 7630; WAN024C2U; Start 11; Stop 35
caagtatcaatagagatgaggacat

SEQ ID NO: 473159 - DNA, 25 bp, Artificial
  probe
  misc_feature (1)..(25): SEQ ID NO: 7630; WAN024C2U; Start 8; Stop 32
ttccaagtatcaatagagatgagga

SEQ ID NO: 473160 - DNA, 25 bp, Artificial
  probe
  misc_feature (1)..(25): SEQ ID NO: 7630; WAN024C2U; Start 6; Stop 30
tcttccaagtatcaatagagatgag

SEQ ID NO: 473161 - DNA, 25 bp, Artificial
  probe
  misc_feature (1)..(25): SEQ ID NO: 7630; WAN024C2U; Start 240; Stop 264
tgataattccgcaaataactgtctt

SEQ ID NO: 473162 - DNA, 25 bp, Artificial
  probe
  misc_feature (1)..(25): SEQ ID NO: 7630; WAN024C2U; Start 76; Stop 100
ctggatttcctcttctatctcaaca

SEQ ID NO: 473163 - DNA, 25 bp, Artificial
  probe
  misc_feature (1)..(25): SEQ ID NO: 7630; WAN024C2U; Start 77; Stop 101
tggatttcctcttctatctcaacat

SEQ ID NO: 473164 - DNA, 25 bp, Artificial
  probe
  misc_feature (1)..(25): SEQ ID NO: 7630; WAN024C2U; Start 231; Stop 255
gggttacattgataattccgcaaat

SEQ ID NO: 473165 - DNA, 25 bp, Artificial
  probe
  misc_feature (1)..(25): SEQ ID NO: 7630; WAN024C2U; Start 75; Stop 99
gctggatttcctcttctatctcaac

SEQ ID NO: 473166 - DNA, 25 bp, Artificial
  probe
  misc_feature (1)..(25): SEQ ID NO: 7630; WAN024C2U; Start 239; Stop 263
ttgataattccgcaaataactgtct

SEQ ID NO: 473167 - DNA, 25 bp, Artificial
  probe
  misc_feature (1)..(25): SEQ ID NO: 7630; WAN024C2U; Start 146; Stop 170
ctggctccttctgctatcaatttac

SEQ ID NO: 473168 - DNA, 25 bp, Artificial
  probe
  misc_feature (1)..(25): SEQ ID NO: 7630; WAN024C2U; Start 145; Stop 169
actggctccttctgctatcaattta

SEQ ID NO: 473169 - DNA, 25 bp, Artificial
  probe
  misc_feature (1)..(25): SEQ ID NO: 7630; WAN024C2U; Start 144; Stop 168
tactggctccttctgctatcaattt

SEQ ID NO: 473170 - DNA, 25 bp, Artificial
  probe
  misc_feature (1)..(25): SEQ ID NO: 7630; WAN024C2U; Start 241; Stop 265
gataattccgcaaataactgtcttt

SEQ ID NO: 473171 - DNA, 25 bp, Artificial
  probe
  misc_feature (1)..(25): SEQ ID NO: 7630; WAN024C2U; Start 237; Stop 261
cattgataattccgcaaataactgt

SEQ ID NO: 473172 - DNA, 25 bp, Artificial
  probe
  misc_feature (1)..(25): SEQ ID NO: 7630; WAN024C2U; Start 236; Stop 260
acattgataattccgcaaataactg

SEQ ID NO: 473173 - DNA, 25 bp, Artificial
  probe
  misc_feature (1)..(25): SEQ ID NO: 7630; WAN024C2U; Start 238; Stop 262
attgataattccgcaaataactgtc

SEQ ID NO: 473174 - DNA, 25 bp, Artificial
  probe
  misc_feature (1)..(25): SEQ ID NO: 7630; WAN024C2U; Start 149; Stop 173
gctccttctgctatcaatttacgag

SEQ ID NO: 473175 - DNA, 25 bp, Artificial
  probe
  misc_feature (1)..(25): SEQ ID NO: 7630; WAN024C2U; Start 74; Stop 98
cgctggatttcctcttctatctcaa

SEQ ID NO: 473176 - DNA, 25 bp, Artificial
  probe
  misc_feature (1)..(25): SEQ ID NO: 7630; WAN024C2U; Start 232; Stop 256
ggttacattgataattccgcaaata

SEQ ID NO: 473177 - DNA, 25 bp, Artificial
  probe
  misc_feature (1)..(25): SEQ ID NO: 7630; WAN024C2U; Start 80; Stop 104
atttcctcttctatctcaacatagc

SEQ ID NO: 473178 - DNA, 25 bp, Artificial
  probe
  misc_feature (1)..(25): SEQ ID NO: 7630; WAN024C2U; Start 16; Stop 40
atcaatagagatgaggacatcactt

SEQ ID NO: 473179 - DNA, 25 bp, Artificial
  probe
  misc_feature (1)..(25): SEQ ID NO: 7630; WAN024C2U; Start 78; Stop 102
ggatttcctcttctatctcaacata

SEQ ID NO: 473180 - DNA, 25 bp, Artificial
  probe
  misc_feature (1)..(25): SEQ ID NO: 7630; WAN024C2U; Start 3; Stop 27
ggctcttccaagtatcaatagagat

SEQ ID NO: 473181 - DNA, 25 bp, Artificial
  probe
  misc_feature (1)..(25): SEQ ID NO: 7630; WAN024C2U; Start 86; Stop 110
tcttctatctcaacatagctactgc

SEQ ID NO: 473182 - DNA, 25 bp, Artificial
  probe
  misc_feature (1)..(25): SEQ ID NO: 7630; WAN024C2U; Start 148; Stop 172
ggctccttctgctatcaatttacga

SEQ ID NO: 473183 - DNA, 25 bp, Artificial
  probe
  misc_feature (1)..(25): SEQ ID NO: 7630; WAN024C2U; Start 2; Stop 26
tggctcttccaagtatcaatagaga

SEQ ID NO: 473184 - DNA, 25 bp, Artificial
  probe
  misc_feature (1)..(25): SEQ ID NO: 7630; WAN024C2U; Start 87; Stop 111
cttctatctcaacatagctactgcc

SEQ ID NO: 473185 - DNA, 25 bp, Artificial
  probe
  misc_feature (1)..(25): SEQ ID NO: 7630; WAN024C2U; Start 70; Stop 94
aacacgctggatttcctcttctatc

SEQ ID NO: 473186 - DNA, 25 bp, Artificial
  probe
  misc_feature (1)..(25): SEQ ID NO: 7631; WAN024DAM; Start 69; Stop 93
ctataaaccgacaaaggacttggat

SEQ ID NO: 473187 - DNA, 25 bp, Artificial
  probe
  misc_feature (1)..(25): SEQ ID NO: 7631; WAN024DAM; Start 70; Stop 94
tataaaccgacaaaggacttggatg

SEQ ID NO: 473188 - DNA, 25 bp, Artificial
  probe
  misc_feature (1)..(25): SEQ ID NO: 7631; WAN024DAM; Start 67; Stop 91
ctctataaaccgacaaaggacttgg

SEQ ID NO: 473189 - DNA, 25 bp, Artificial
  probe
  misc_feature (1)..(25): SEQ ID NO: 7631; WAN024DAM; Start 68; Stop 92
tctataaaccgacaaaggacttgga

SEQ ID NO: 473190 - DNA, 25 bp, Artificial
  probe
  misc_feature (1)..(25): SEQ ID NO: 7631; WAN024DAM; Start 66; Stop 90
cctctataaaccgacaaaggacttg

SEQ ID NO: 473191 - DNA, 25 bp, Artificial
  probe
  misc_feature (1)..(25): SEQ ID NO: 7631; WAN024DAM; Start 71; Stop 95
ataaaccgacaaaggacttggatgg

SEQ ID NO: 473192 - DNA, 25 bp, Artificial
  probe
  misc_feature (1)..(25): SEQ ID NO: 7631; WAN024DAM; Start 59; Stop 83
ccaaaatcctctataaaccgacaaa

SEQ ID NO: 473193 - DNA, 25 bp, Artificial
  probe
  misc_feature (1)..(25): SEQ ID NO: 7631; WAN024DAM; Start 58; Stop 82
cccaaaatcctctataaaccgacaa

SEQ ID NO: 473194 - DNA, 25 bp, Artificial
  probe
  misc_feature (1)..(25): SEQ ID NO: 7631; WAN024DAM; Start 54; Stop 78
gaaccccaaaatcctctataaaccg

SEQ ID NO: 473195 - DNA, 25 bp, Artificial
  probe
  misc_feature (1)..(25): SEQ ID NO: 7631; WAN024DAM; Start 60; Stop 84
caaaatcctctataaaccgacaaag

SEQ ID NO: 473196 - DNA, 25 bp, Artificial
  probe
  misc_feature (1)..(25): SEQ ID NO: 7631; WAN024DAM; Start 55; Stop 79
aaccccaaaatcctctataaaccga

SEQ ID NO: 473197 - DNA, 25 bp, Artificial
  probe
  misc_feature (1)..(25): SEQ ID NO: 7631; WAN024DAM; Start 7; Stop 31
cttgtcctgtctcttttaagaatgc

SEQ ID NO: 473198 - DNA, 25 bp, Artificial
  probe
  misc_feature (1)..(25): SEQ ID NO: 7631; WAN024DAM; Start 1; Stop 25
ttggctcttgtcctgtctcttttaa

SEQ ID NO: 473199 - DNA, 25 bp, Artificial
  probe
  misc_feature (1)..(25): SEQ ID NO: 7631; WAN024DAM; Start 57; Stop 81
ccccaaaatcctctataaaccgaca

SEQ ID NO: 473200 - DNA, 25 bp, Artificial
  probe
  misc_feature (1)..(25): SEQ ID NO: 7631; WAN024DAM; Start 56; Stop 80
accccaaaatcctctataaaccgac

SEQ ID NO: 473201 - DNA, 25 bp, Artificial
  probe
  misc_feature (1)..(25): SEQ ID NO: 7631; WAN024DAM; Start 61; Stop 85
aaaatcctctataaaccgacaaagg

SEQ ID NO: 473202 - DNA, 25 bp, Artificial
  probe
  misc_feature (1)..(25): SEQ ID NO: 7631; WAN024DAM; Start 2; Stop 26
tggctcttgtcctgtctcttttaag

SEQ ID NO: 473203 - DNA, 25 bp, Artificial
  probe
  misc_feature (1)..(25): SEQ ID NO: 7631; WAN024DAM; Start 52; Stop 76
tggaaccccaaaatcctctataaac

SEQ ID NO: 473204 - DNA, 25 bp, Artificial
  probe
  misc_feature (1)..(25): SEQ ID NO: 7631; WAN024DAM; Start 53; Stop 77
ggaaccccaaaatcctctataaacc

SEQ ID NO: 473205 - DNA, 25 bp, Artificial
  probe
  misc_feature (1)..(25): SEQ ID NO: 7631; WAN024DAM; Start 8; Stop 32
ttgtcctgtctcttttaagaatgca

SEQ ID NO: 473206 - DNA, 25 bp, Artificial
  probe
  misc_feature (1)..(25): SEQ ID NO: 7631; WAN024DAM; Start 4; Stop 28
gctcttgtcctgtctcttttaagaa

SEQ ID NO: 473207 - DNA, 25 bp, Artificial
  probe
  misc_feature (1)..(25): SEQ ID NO: 7631; WAN024DAM; Start 63; Stop 87
aatcctctataaaccgacaaaggac

SEQ ID NO: 473208 - DNA, 25 bp, Artificial
  probe
  misc_feature (1)..(25): SEQ ID NO: 7631; WAN024DAM; Start 62; Stop 86
aaatcctctataaaccgacaaagga

SEQ ID NO: 473209 - DNA, 25 bp, Artificial
  probe
  misc_feature (1)..(25): SEQ ID NO: 7631; WAN024DAM; Start 6; Stop 30
tcttgtcctgtctcttttaagaatg

SEQ ID NO: 473210 - DNA, 25 bp, Artificial
  probe
  misc_feature (1)..(25): SEQ ID NO: 7631; WAN024DAM; Start 64; Stop 88
atcctctataaaccgacaaaggact

SEQ ID NO: 473211 - DNA, 25 bp, Artificial
  probe
  misc_feature (1)..(25): SEQ ID NO: 7631; WAN024DAM; Start 72; Stop 96
taaaccgacaaaggacttggatggg

SEQ ID NO: 473212 - DNA, 25 bp, Artificial
  probe
  misc_feature (1)..(25): SEQ ID NO: 7631; WAN024DAM; Start 65; Stop 89
tcctctataaaccgacaaaggactt

SEQ ID NO: 473213 - DNA, 25 bp, Artificial
  probe
  misc_feature (1)..(25): SEQ ID NO: 7631; WAN024DAM; Start 5; Stop 29
ctcttgtcctgtctcttttaagaat

SEQ ID NO: 473214 - DNA, 25 bp, Artificial
  probe
  misc_feature (1)..(25): SEQ ID NO: 7631; WAN024DAM; Start 79; Stop 103
acaaaggacttggatgggctgattc

SEQ ID NO: 473215 - DNA, 25 bp, Artificial
  probe
  misc_feature (1)..(25): SEQ ID NO: 7631; WAN024DAM; Start 78; Stop 102
gacaaaggacttggatgggctgatt

SEQ ID NO: 473216 - DNA, 25 bp, Artificial
  probe
  misc_feature (1)..(25): SEQ ID NO: 7631; WAN024DAM; Start 3; Stop 27
ggctcttgtcctgtctcttttaaga

SEQ ID NO: 473217 - DNA, 25 bp, Artificial
  probe
  misc_feature (1)..(25): SEQ ID NO: 7631; WAN024DAM; Start 9; Stop 33
tgtcctgtctcttttaagaatgcat

SEQ ID NO: 473218 - DNA, 25 bp, Artificial
  probe
  misc_feature (1)..(25): SEQ ID NO: 7631; WAN024DAM; Start 51; Stop 75
ttggaaccccaaaatcctctataaa

SEQ ID NO: 473219 - DNA, 25 bp, Artificial
  probe
  misc_feature (1)..(25): SEQ ID NO: 7632; WAN024FJW; Start 114; Stop 138
attaatagatgctggagctgaagtt

SEQ ID NO: 473220 - DNA, 25 bp, Artificial
  probe
  misc_feature (1)..(25): SEQ ID NO: 7632; WAN024FJW; Start 37; Stop 61
cctctattaacatcttccttacgga

SEQ ID NO: 473221 - DNA, 25 bp, Artificial
  probe
  misc_feature (1)..(25): SEQ ID NO: 7632; WAN024FJW; Start 115; Stop 139
ttaatagatgctggagctgaagttg

SEQ ID NO: 473222 - DNA, 25 bp, Artificial
  probe
  misc_feature (1)..(25): SEQ ID NO: 7632; WAN024FJW; Start 113; Stop 137
cattaatagatgctggagctgaagt

SEQ ID NO: 473223 - DNA, 25 bp, Artificial
  probe
  misc_feature (1)..(25): SEQ ID NO: 7632; WAN024FJW; Start 112; Stop 136
tcattaatagatgctggagctgaag

SEQ ID NO: 473224 - DNA, 25 bp, Artificial
  probe
  misc_feature (1)..(25): SEQ ID NO: 7632; WAN024FJW; Start 36; Stop 60
ccctctattaacatcttccttacgg

SEQ ID NO: 473225 - DNA, 25 bp, Artificial
  probe
  misc_feature (1)..(25): SEQ ID NO: 7632; WAN024FJW; Start 35; Stop 59
accctctattaacatcttccttacg

SEQ ID NO: 473226 - DNA, 25 bp, Artificial
  probe
  misc_feature (1)..(25): SEQ ID NO: 7632; WAN024FJW; Start 116; Stop 140
taatagatgctggagctgaagttgt

SEQ ID NO: 473227 - DNA, 25 bp, Artificial
  probe
  misc_feature (1)..(25): SEQ ID NO: 7632; WAN024FJW; Start 41; Stop 65
tattaacatcttccttacggatagc

SEQ ID NO: 473228 - DNA, 25 bp, Artificial
  probe
  misc_feature (1)..(25): SEQ ID NO: 7632; WAN024FJW; Start 43; Stop 67
ttaacatcttccttacggatagctg

SEQ ID NO: 473229 - DNA, 25 bp, Artificial
  probe
  misc_feature (1)..(25): SEQ ID NO: 7632; WAN024FJW; Start 42; Stop 66
attaacatcttccttacggatagct

SEQ ID NO: 473230 - DNA, 25 bp, Artificial
  probe
  misc_feature (1)..(25): SEQ ID NO: 7632; WAN024FJW; Start 38; Stop 62
ctctattaacatcttccttacggat

SEQ ID NO: 473231 - DNA, 25 bp, Artificial
  probe
  misc_feature (1)..(25): SEQ ID NO: 7632; WAN024FJW; Start 117; Stop 141
aatagatgctggagctgaagttgtt

SEQ ID NO: 473232 - DNA, 25 bp, Artificial
  probe
  misc_feature (1)..(25): SEQ ID NO: 7632; WAN024FJW; Start 259; Stop 283
ggcgtttctgatacagtttctttat

SEQ ID NO: 473233 - DNA, 25 bp, Artificial
  probe
  misc_feature (1)..(25): SEQ ID NO: 7632; WAN024FJW; Start 258; Stop 282
aggcgtttctgatacagtttcttta

SEQ ID NO: 473234 - DNA, 25 bp, Artificial
  probe
  misc_feature (1)..(25): SEQ ID NO: 7632; WAN024FJW; Start 27; Stop 51
accactataccctctattaacatct

SEQ ID NO: 473235 - DNA, 25 bp, Artificial
  probe
  misc_feature (1)..(25): SEQ ID NO: 7632; WAN024FJW; Start 44; Stop 68
taacatcttccttacggatagctgg

SEQ ID NO: 473236 - DNA, 25 bp, Artificial
  probe
  misc_feature (1)..(25): SEQ ID NO: 7632; WAN024FJW; Start 47; Stop 71
catcttccttacggatagctggatt

SEQ ID NO: 473237 - DNA, 25 bp, Artificial
  probe
  misc_feature (1)..(25): SEQ ID NO: 7632; WAN024FJW; Start 107; Stop 131
agatttcattaatagatgctggagc

SEQ ID NO: 473238 - DNA, 25 bp, Artificial
  probe
  misc_feature (1)..(25): SEQ ID NO: 7632; WAN024FJW; Start 254; Stop 278
ctacaggcgtttctgatacagtttc

SEQ ID NO: 473239 - DNA, 25 bp, Artificial
  probe
  misc_feature (1)..(25): SEQ ID NO: 7632; WAN024FJW; Start 109; Stop 133
atttcattaatagatgctggagctg

SEQ ID NO: 473240 - DNA, 25 bp, Artificial
  probe
  misc_feature (1)..(25): SEQ ID NO: 7632; WAN024FJW; Start 26; Stop 50
aaccactataccctctattaacatc

SEQ ID NO: 473241 - DNA, 25 bp, Artificial
  probe
  misc_feature (1)..(25): SEQ ID NO: 7632; WAN024FJW; Start 260; Stop 284
gcgtttctgatacagtttctttatt

SEQ ID NO: 473242 - DNA, 25 bp, Artificial
  probe
  misc_feature (1)..(25): SEQ ID NO: 7632; WAN024FJW; Start 257; Stop 281
caggcgtttctgatacagtttcttt

SEQ ID NO: 473243 - DNA, 25 bp, Artificial
  probe
  misc_feature (1)..(25): SEQ ID NO: 7632; WAN024FJW; Start 108; Stop 132
gatttcattaatagatgctggagct

SEQ ID NO: 473244 - DNA, 25 bp, Artificial
  probe
  misc_feature (1)..(25): SEQ ID NO: 7632; WAN024FJW; Start 110; Stop 134
tttcattaatagatgctggagctga

SEQ ID NO: 473245 - DNA, 25 bp, Artificial
  probe
  misc_feature (1)..(25): SEQ ID NO: 7632; WAN024FJW; Start 111; Stop 135
ttcattaatagatgctggagctgaa

SEQ ID NO: 473246 - DNA, 25 bp, Artificial
  probe
  misc_feature (1)..(25): SEQ ID NO: 7632; WAN024FJW; Start 255; Stop 279
tacaggcgtttctgatacagtttct

SEQ ID NO: 473247 - DNA, 25 bp, Artificial
  probe
  misc_feature (1)..(25): SEQ ID NO: 7632; WAN024FJW; Start 34; Stop 58
taccctctattaacatcttccttac

SEQ ID NO: 473248 - DNA, 25 bp, Artificial
  probe
  misc_feature (1)..(25): SEQ ID NO: 7632; WAN024FJW; Start 28; Stop 52
ccactataccctctattaacatctt

SEQ ID NO: 473249 - DNA, 25 bp, Artificial
  probe
  misc_feature (1)..(25): SEQ ID NO: 7632; WAN024FJW; Start 39; Stop 63
tctattaacatcttccttacggata

SEQ ID NO: 473250 - DNA, 25 bp, Artificial
  probe
  misc_feature (1)..(25): SEQ ID NO: 7632; WAN024FJW; Start 30; Stop 54
actataccctctattaacatcttcc

SEQ ID NO: 473251 - DNA, 25 bp, Artificial
  probe
  misc_feature (1)..(25): SEQ ID NO: 7632; WAN024FJW; Start 25; Stop 49
aaaccactataccctctattaacat

SEQ ID NO: 473252 - DNA, 25 bp, Artificial
  probe
  misc_feature (1)..(25): SEQ ID NO: 7633; WAN024BRZ; Start 236; Stop 260
ctattagcgtccgtagtctcatacc

SEQ ID NO: 473253 - DNA, 25 bp, Artificial
  probe
  misc_feature (1)..(25): SEQ ID NO: 7633; WAN024BRZ; Start 238; Stop 262
attagcgtccgtagtctcataccta

SEQ ID NO: 473254 - DNA, 25 bp, Artificial
  probe
  misc_feature (1)..(25): SEQ ID NO: 7633; WAN024BRZ; Start 237; Stop 261
tattagcgtccgtagtctcatacct

SEQ ID NO: 473255 - DNA, 25 bp, Artificial
  probe
  misc_feature (1)..(25): SEQ ID NO: 7633; WAN024BRZ; Start 234; Stop 258
aactattagcgtccgtagtctcata

SEQ ID NO: 473256 - DNA, 25 bp, Artificial
  probe
  misc_feature (1)..(25): SEQ ID NO: 7633; WAN024BRZ; Start 275; Stop 299
attccgtctgtatttatcctaaccg

SEQ ID NO: 473257 - DNA, 25 bp, Artificial
  probe
  misc_feature (1)..(25): SEQ ID NO: 7633; WAN024BRZ; Start 235; Stop 259
actattagcgtccgtagtctcatac

SEQ ID NO: 473258 - DNA, 25 bp, Artificial
  probe
  misc_feature (1)..(25): SEQ ID NO: 7633; WAN024BRZ; Start 270; Stop 294
aagcaattccgtctgtatttatcct

SEQ ID NO: 473259 - DNA, 25 bp, Artificial
  probe
  misc_feature (1)..(25): SEQ ID NO: 7633; WAN024BRZ; Start 269; Stop 293
aaagcaattccgtctgtatttatcc

SEQ ID NO: 473260 - DNA, 25 bp, Artificial
  probe
  misc_feature (1)..(25): SEQ ID NO: 7633; WAN024BRZ; Start 271; Stop 295
agcaattccgtctgtatttatccta

SEQ ID NO: 473261 - DNA, 25 bp, Artificial
  probe
  misc_feature (1)..(25): SEQ ID NO: 7633; WAN024BRZ; Start 239; Stop 263
ttagcgtccgtagtctcatacctag

SEQ ID NO: 473262 - DNA, 25 bp, Artificial
  probe
  misc_feature (1)..(25): SEQ ID NO: 7633; WAN024BRZ; Start 272; Stop 296
gcaattccgtctgtatttatcctaa

SEQ ID NO: 473263 - DNA, 25 bp, Artificial
  probe
  misc_feature (1)..(25): SEQ ID NO: 7633; WAN024BRZ; Start 274; Stop 298
aattccgtctgtatttatcctaacc

SEQ ID NO: 473264 - DNA, 25 bp, Artificial
  probe
  misc_feature (1)..(25): SEQ ID NO: 7633; WAN024BRZ; Start 141; Stop 165
aatactcagccacagcctaagtaac

SEQ ID NO: 473265 - DNA, 25 bp, Artificial
  probe
  misc_feature (1)..(25): SEQ ID NO: 7633; WAN024BRZ; Start 140; Stop 164
caatactcagccacagcctaagtaa

SEQ ID NO: 473266 - DNA, 25 bp, Artificial
  probe
  misc_feature (1)..(25): SEQ ID NO: 7633; WAN024BRZ; Start 276; Stop 300
ttccgtctgtatttatcctaaccgc

SEQ ID NO: 473267 - DNA, 25 bp, Artificial
  probe
  misc_feature (1)..(25): SEQ ID NO: 7633; WAN024BRZ; Start 273; Stop 297
caattccgtctgtatttatcctaac

SEQ ID NO: 473268 - DNA, 25 bp, Artificial
  probe
  misc_feature (1)..(25): SEQ ID NO: 7633; WAN024BRZ; Start 197; Stop 221
caaacaaacttgagcttcacttact

SEQ ID NO: 473269 - DNA, 25 bp, Artificial
  probe
  misc_feature (1)..(25): SEQ ID NO: 7633; WAN024BRZ; Start 233; Stop 257
aaactattagcgtccgtagtctcat

SEQ ID NO: 473270 - DNA, 25 bp, Artificial
  probe
  misc_feature (1)..(25): SEQ ID NO: 7633; WAN024BRZ; Start 188; Stop 212
taaattctgcaaacaaacttgagct

SEQ ID NO: 473271 - DNA, 25 bp, Artificial
  probe
  misc_feature (1)..(25): SEQ ID NO: 7633; WAN024BRZ; Start 187; Stop 211
gtaaattctgcaaacaaacttgagc

SEQ ID NO: 473272 - DNA, 25 bp, Artificial
  probe
  misc_feature (1)..(25): SEQ ID NO: 7633; WAN024BRZ; Start 200; Stop 224
acaaacttgagcttcacttactaaa

SEQ ID NO: 473273 - DNA, 25 bp, Artificial
  probe
  misc_feature (1)..(25): SEQ ID NO: 7633; WAN024BRZ; Start 199; Stop 223
aacaaacttgagcttcacttactaa

SEQ ID NO: 473274 - DNA, 25 bp, Artificial
  probe
  misc_feature (1)..(25): SEQ ID NO: 7633; WAN024BRZ; Start 198; Stop 222
aaacaaacttgagcttcacttacta

SEQ ID NO: 473275 - DNA, 25 bp, Artificial
  probe
  misc_feature (1)..(25): SEQ ID NO: 7633; WAN024BRZ; Start 102; Stop 126
ctgtgaactcagcgtatcatttaaa

SEQ ID NO: 473276 - DNA, 25 bp, Artificial
  probe
  misc_feature (1)..(25): SEQ ID NO: 7633; WAN024BRZ; Start 223; Stop 247
aaagtgatcgaaactattagcgtcc

SEQ ID NO: 473277 - DNA, 25 bp, Artificial
  probe
  misc_feature (1)..(25): SEQ ID NO: 7633; WAN024BRZ; Start 189; Stop 213
aaattctgcaaacaaacttgagctt

SEQ ID NO: 473278 - DNA, 25 bp, Artificial
  probe
  misc_feature (1)..(25): SEQ ID NO: 7633; WAN024BRZ; Start 196; Stop 220
gcaaacaaacttgagcttcacttac

SEQ ID NO: 473279 - DNA, 25 bp, Artificial
  probe
  misc_feature (1)..(25): SEQ ID NO: 7633; WAN024BRZ; Start 190; Stop 214
aattctgcaaacaaacttgagcttc

SEQ ID NO: 473280 - DNA, 25 bp, Artificial
  probe
  misc_feature (1)..(25): SEQ ID NO: 7633; WAN024BRZ; Start 232; Stop 256
gaaactattagcgtccgtagtctca

SEQ ID NO: 473281 - DNA, 25 bp, Artificial
  probe
  misc_feature (1)..(25): SEQ ID NO: 7633; WAN024BRZ; Start 186; Stop 210
agtaaattctgcaaacaaacttgag

SEQ ID NO: 473282 - DNA, 25 bp, Artificial
  probe
  misc_feature (1)..(25): SEQ ID NO: 7633; WAN024BRZ; Start 227; Stop 251
tgatcgaaactattagcgtccgtag

SEQ ID NO: 473283 - DNA, 25 bp, Artificial
  probe
  misc_feature (1)..(25): SEQ ID NO: 7633; WAN024BRZ; Start 226; Stop 250
gtgatcgaaactattagcgtccgta

SEQ ID NO: 473284 - DNA, 25 bp, Artificial
  probe
  misc_feature (1)..(25): SEQ ID NO: 7633; WAN024BRZ; Start 195; Stop 219
tgcaaacaaacttgagcttcactta

SEQ ID NO: 473285 - DNA, 25 bp, Artificial
  probe
  misc_feature (1)..(25): SEQ ID NO: 7634; WAN024DN3; Start 59; Stop 83
ctttagacaattacgagagtcaaga

SEQ ID NO: 473286 - DNA, 25 bp, Artificial
  probe
  misc_feature (1)..(25): SEQ ID NO: 7634; WAN024DN3; Start 58; Stop 82
tctttagacaattacgagagtcaag

SEQ ID NO: 473287 - DNA, 25 bp, Artificial
  probe
  misc_feature (1)..(25): SEQ ID NO: 7634; WAN024DN3; Start 56; Stop 80
agtctttagacaattacgagagtca

SEQ ID NO: 473288 - DNA, 25 bp, Artificial
  probe
  misc_feature (1)..(25): SEQ ID NO: 7634; WAN024DN3; Start 61; Stop 85
ttagacaattacgagagtcaagaaa

SEQ ID NO: 473289 - DNA, 25 bp, Artificial
  probe
  misc_feature (1)..(25): SEQ ID NO: 7634; WAN024DN3; Start 60; Stop 84
tttagacaattacgagagtcaagaa

SEQ ID NO: 473290 - DNA, 25 bp, Artificial
  probe
  misc_feature (1)..(25): SEQ ID NO: 7634; WAN024DN3; Start 63; Stop 87
agacaattacgagagtcaagaaata

SEQ ID NO: 473291 - DNA, 25 bp, Artificial
  probe
  misc_feature (1)..(25): SEQ ID NO: 7634; WAN024DN3; Start 62; Stop 86
tagacaattacgagagtcaagaaat

SEQ ID NO: 473292 - DNA, 25 bp, Artificial
  probe
  misc_feature (1)..(25): SEQ ID NO: 7634; WAN024DN3; Start 57; Stop 81
gtctttagacaattacgagagtcaa

SEQ ID NO: 473293 - DNA, 25 bp, Artificial
  probe
  misc_feature (1)..(25): SEQ ID NO: 7634; WAN024DN3; Start 55; Stop 79
aagtctttagacaattacgagagtc

SEQ ID NO: 473294 - DNA, 25 bp, Artificial
  probe
  misc_feature (1)..(25): SEQ ID NO: 7634; WAN024DN3; Start 65; Stop 89
acaattacgagagtcaagaaatatc

SEQ ID NO: 473295 - DNA, 25 bp, Artificial
  probe
  misc_feature (1)..(25): SEQ ID NO: 7634; WAN024DN3; Start 54; Stop 78
aaagtctttagacaattacgagagt

SEQ ID NO: 473296 - DNA, 25 bp, Artificial
  probe
  misc_feature (1)..(25): SEQ ID NO: 7634; WAN024DN3; Start 2; Stop 26
tgggaaatgaagaaaatacggaatc

SEQ ID NO: 473297 - DNA, 25 bp, Artificial
  probe
  misc_feature (1)..(25): SEQ ID NO: 7634; WAN024DN3; Start 1; Stop 25
ttgggaaatgaagaaaatacggaat

SEQ ID NO: 473298 - DNA, 25 bp, Artificial
  probe
  misc_feature (1)..(25): SEQ ID NO: 7634; WAN024DN3; Start 66; Stop 90
caattacgagagtcaagaaatatct

SEQ ID NO: 473299 - DNA, 25 bp, Artificial
  probe
  misc_feature (1)..(25): SEQ ID NO: 7634; WAN024DN3; Start 64; Stop 88
gacaattacgagagtcaagaaatat

SEQ ID NO: 473300 - DNA, 25 bp, Artificial
  probe
  misc_feature (1)..(25): SEQ ID NO: 7634; WAN024DN3; Start 3; Stop 27
gggaaatgaagaaaatacggaatca

SEQ ID NO: 473301 - DNA, 25 bp, Artificial
  probe
  misc_feature (1)..(25): SEQ ID NO: 7634; WAN024DN3; Start 38; Stop 62
tatggagcagattggaaaagtcttt

SEQ ID NO: 473302 - DNA, 25 bp, Artificial
  probe
  misc_feature (1)..(25): SEQ ID NO: 7634; WAN024DN3; Start 4; Stop 28
ggaaatgaagaaaatacggaatcaa

SEQ ID NO: 473303 - DNA, 25 bp, Artificial
  probe
  misc_feature (1)..(25): SEQ ID NO: 7634; WAN024DN3; Start 69; Stop 93
ttacgagagtcaagaaatatctcac

SEQ ID NO: 473304 - DNA, 25 bp, Artificial
  probe
  misc_feature (1)..(25): SEQ ID NO: 7634; WAN024DN3; Start 5; Stop 29
gaaatgaagaaaatacggaatcaag

SEQ ID NO: 473305 - DNA, 25 bp, Artificial
  probe
  misc_feature (1)..(25): SEQ ID NO: 7634; WAN024DN3; Start 68; Stop 92
attacgagagtcaagaaatatctca

SEQ ID NO: 473306 - DNA, 25 bp, Artificial
  probe
  misc_feature (1)..(25): SEQ ID NO: 7634; WAN024DN3; Start 53; Stop 77
aaaagtctttagacaattacgagag

SEQ ID NO: 473307 - DNA, 25 bp, Artificial
  probe
  misc_feature (1)..(25): SEQ ID NO: 7634; WAN024DN3; Start 67; Stop 91
aattacgagagtcaagaaatatctc

SEQ ID NO: 473308 - DNA, 25 bp, Artificial
  probe
  misc_feature (1)..(25): SEQ ID NO: 7635; WAN024F6N; Start 3; Stop 27
gggaacacgtaaattatactcttcg

SEQ ID NO: 473309 - DNA, 25 bp, Artificial
  probe
  misc_feature (1)..(25): SEQ ID NO: 7635; WAN024F6N; Start 4; Stop 28
ggaacacgtaaattatactcttcga

SEQ ID NO: 473310 - DNA, 25 bp, Artificial
  probe
  misc_feature (1)..(25): SEQ ID NO: 7635; WAN024F6N; Start 2; Stop 26
tgggaacacgtaaattatactcttc

SEQ ID NO: 473311 - DNA, 25 bp, Artificial
  probe
  misc_feature (1)..(25): SEQ ID NO: 7635; WAN024F6N; Start 1; Stop 25
ttgggaacacgtaaattatactctt

SEQ ID NO: 473312 - DNA, 25 bp, Artificial
  probe
  misc_feature (1)..(25): SEQ ID NO: 7635; WAN024F6N; Start 26; Stop 50
cgaaaatctcttcaaaccaggtcag

SEQ ID NO: 473313 - DNA, 25 bp, Artificial
  probe
  misc_feature (1)..(25): SEQ ID NO: 7635; WAN024F6N; Start 27; Stop 51
gaaaatctcttcaaaccaggtcagc

SEQ ID NO: 473314 - DNA, 25 bp, Artificial
  probe
  misc_feature (1)..(25): SEQ ID NO: 7635; WAN024F6N; Start 25; Stop 49
tcgaaaatctcttcaaaccaggtca

SEQ ID NO: 473315 - DNA, 25 bp, Artificial
  probe
  misc_feature (1)..(25): SEQ ID NO: 7635; WAN024F6N; Start 28; Stop 52
aaaatctcttcaaaccaggtcagcc

SEQ ID NO: 473316 - DNA, 25 bp, Artificial
  probe
  misc_feature (1)..(25): SEQ ID NO: 7635; WAN024F6N; Start 29; Stop 53
aaatctcttcaaaccaggtcagccc

SEQ ID NO: 473317 - DNA, 25 bp, Artificial
  probe
  misc_feature (1)..(25): SEQ ID NO: 7635; WAN024F6N; Start 33; Stop 57
ctcttcaaaccaggtcagccctatc

SEQ ID NO: 473318 - DNA, 25 bp, Artificial
  probe
  misc_feature (1)..(25): SEQ ID NO: 7635; WAN024F6N; Start 5; Stop 29
gaacacgtaaattatactcttcgaa

SEQ ID NO: 473319 - DNA, 25 bp, Artificial
  probe
  misc_feature (1)..(25): SEQ ID NO: 7635; WAN024F6N; Start 6; Stop 30
aacacgtaaattatactcttcgaaa

SEQ ID NO: 473320 - DNA, 25 bp, Artificial
  probe
  misc_feature (1)..(25): SEQ ID NO: 7635; WAN024F6N; Start 32; Stop 56
tctcttcaaaccaggtcagccctat

SEQ ID NO: 473321 - DNA, 25 bp, Artificial
  probe
  misc_feature (1)..(25): SEQ ID NO: 7635; WAN024F6N; Start 31; Stop 55
atctcttcaaaccaggtcagcccta

SEQ ID NO: 473322 - DNA, 25 bp, Artificial
  probe
  misc_feature (1)..(25): SEQ ID NO: 7635; WAN024F6N; Start 21; Stop 45
ctcttcgaaaatctcttcaaaccag

SEQ ID NO: 473323 - DNA, 25 bp, Artificial
  probe
  misc_feature (1)..(25): SEQ ID NO: 7635; WAN024F6N; Start 22; Stop 46
tcttcgaaaatctcttcaaaccagg

SEQ ID NO: 473324 - DNA, 25 bp, Artificial
  probe
  misc_feature (1)..(25): SEQ ID NO: 7635; WAN024F6N; Start 24; Stop 48
ttcgaaaatctcttcaaaccaggtc

SEQ ID NO: 473325 - DNA, 25 bp, Artificial
  probe
  misc_feature (1)..(25): SEQ ID NO: 7635; WAN024F6N; Start 23; Stop 47
cttcgaaaatctcttcaaaccaggt

SEQ ID NO: 473326 - DNA, 25 bp, Artificial
  probe
  misc_feature (1)..(25): SEQ ID NO: 7635; WAN024F6N; Start 7; Stop 31
acacgtaaattatactcttcgaaaa

SEQ ID NO: 473327 - DNA, 25 bp, Artificial
  probe
  misc_feature (1)..(25): SEQ ID NO: 7635; WAN024F6N; Start 8; Stop 32
cacgtaaattatactcttcgaaaat

SEQ ID NO: 473328 - DNA, 25 bp, Artificial
  probe
  misc_feature (1)..(25): SEQ ID NO: 7635; WAN024F6N; Start 15; Stop 39
attatactcttcgaaaatctcttca

SEQ ID NO: 473329 - DNA, 25 bp, Artificial
  probe
  misc_feature (1)..(25): SEQ ID NO: 7635; WAN024F6N; Start 9; Stop 33
acgtaaattatactcttcgaaaatc

SEQ ID NO: 473330 - DNA, 25 bp, Artificial
  probe
  misc_feature (1)..(25): SEQ ID NO: 7635; WAN024F6N; Start 10; Stop 34
cgtaaattatactcttcgaaaatct

SEQ ID NO: 473331 - DNA, 25 bp, Artificial
  probe
  misc_feature (1)..(25): SEQ ID NO: 7635; WAN024F6N; Start 14; Stop 38
aattatactcttcgaaaatctcttc

SEQ ID NO: 473332 - DNA, 25 bp, Artificial
  probe
  misc_feature (1)..(25): SEQ ID NO: 7636; WAN024BPF; Start 161; Stop 185
cattgtggtggcaaggttatgataa

SEQ ID NO: 473333 - DNA, 25 bp, Artificial
  probe
  misc_feature (1)..(25): SEQ ID NO: 7636; WAN024BPF; Start 471; Stop 495
gactggtgagatgacagattattct

SEQ ID NO: 473334 - DNA, 25 bp, Artificial
  probe
  misc_feature (1)..(25): SEQ ID NO: 7636; WAN024BPF; Start 470; Stop 494
agactggtgagatgacagattattc

SEQ ID NO: 473335 - DNA, 25 bp, Artificial
  probe
  misc_feature (1)..(25): SEQ ID NO: 7636; WAN024BPF; Start 469; Stop 493
aagactggtgagatgacagattatt

SEQ ID NO: 473336 - DNA, 25 bp, Artificial
  probe
  misc_feature (1)..(25): SEQ ID NO: 7636; WAN024BPF; Start 392; Stop 416
ggacttggattgattcaactgtgtt

SEQ ID NO: 473337 - DNA, 25 bp, Artificial
  probe
  misc_feature (1)..(25): SEQ ID NO: 7636; WAN024BPF; Start 160; Stop 184
acattgtggtggcaaggttatgata

SEQ ID NO: 473338 - DNA, 25 bp, Artificial
  probe
  misc_feature (1)..(25): SEQ ID NO: 7636; WAN024BPF; Start 462; Stop 486
tacaataaagactggtgagatgaca

SEQ ID NO: 473339 - DNA, 25 bp, Artificial
  probe
  misc_feature (1)..(25): SEQ ID NO: 7636; WAN024BPF; Start 186; Stop 210
cgctcctgaaattgtaaagtattgt

SEQ ID NO: 473340 - DNA, 25 bp, Artificial
  probe
  misc_feature (1)..(25): SEQ ID NO: 7636; WAN024BPF; Start 185; Stop 209
acgctcctgaaattgtaaagtattg

SEQ ID NO: 473341 - DNA, 25 bp, Artificial
  probe
  misc_feature (1)..(25): SEQ ID NO: 7636; WAN024BPF; Start 181; Stop 205
gataacgctcctgaaattgtaaagt

SEQ ID NO: 473342 - DNA, 25 bp, Artificial
  probe
  misc_feature (1)..(25): SEQ ID NO: 7636; WAN024BPF; Start 180; Stop 204
tgataacgctcctgaaattgtaaag

SEQ ID NO: 473343 - DNA, 25 bp, Artificial
  probe
  misc_feature (1)..(25): SEQ ID NO: 7636; WAN024BPF; Start 184; Stop 208
aacgctcctgaaattgtaaagtatt

SEQ ID NO: 473344 - DNA, 25 bp, Artificial
  probe
  misc_feature (1)..(25): SEQ ID NO: 7636; WAN024BPF; Start 179; Stop 203
atgataacgctcctgaaattgtaaa

SEQ ID NO: 473345 - DNA, 25 bp, Artificial
  probe
  misc_feature (1)..(25): SEQ ID NO: 7636; WAN024BPF; Start 406; Stop 430
tcaactgtgtttattcattcgtctt

SEQ ID NO: 473346 - DNA, 25 bp, Artificial
  probe
  misc_feature (1)..(25): SEQ ID NO: 7636; WAN024BPF; Start 405; Stop 429
ttcaactgtgtttattcattcgtct

SEQ ID NO: 473347 - DNA, 25 bp, Artificial
  probe
  misc_feature (1)..(25): SEQ ID NO: 7636; WAN024BPF; Start 461; Stop 485
ttacaataaagactggtgagatgac

SEQ ID NO: 473348 - DNA, 25 bp, Artificial
  probe
  misc_feature (1)..(25): SEQ ID NO: 7636; WAN024BPF; Start 162; Stop 186
attgtggtggcaaggttatgataac

SEQ ID NO: 473349 - DNA, 25 bp, Artificial
  probe
  misc_feature (1)..(25): SEQ ID NO: 7636; WAN024BPF; Start 183; Stop 207
taacgctcctgaaattgtaaagtat

SEQ ID NO: 473350 - DNA, 25 bp, Artificial
  probe
  misc_feature (1)..(25): SEQ ID NO: 7636; WAN024BPF; Start 182; Stop 206
ataacgctcctgaaattgtaaagta

SEQ ID NO: 473351 - DNA, 25 bp, Artificial
  probe
  misc_feature (1)..(25): SEQ ID NO: 7636; WAN024BPF; Start 407; Stop 431
caactgtgtttattcattcgtcttt

SEQ ID NO: 473352 - DNA, 25 bp, Artificial
  probe
  misc_feature (1)..(25): SEQ ID NO: 7636; WAN024BPF; Start 178; Stop 202
tatgataacgctcctgaaattgtaa

SEQ ID NO: 473353 - DNA, 25 bp, Artificial
  probe
  misc_feature (1)..(25): SEQ ID NO: 7636; WAN024BPF; Start 177; Stop 201
ttatgataacgctcctgaaattgta

SEQ ID NO: 473354 - DNA, 25 bp, Artificial
  probe
  misc_feature (1)..(25): SEQ ID NO: 7636; WAN024BPF; Start 259; Stop 283
tgtttagatgaatcctcctttgagc

SEQ ID NO: 473355 - DNA, 25 bp, Artificial
  probe
  misc_feature (1)..(25): SEQ ID NO: 7636; WAN024BPF; Start 257; Stop 281
attgtttagatgaatcctcctttga

SEQ ID NO: 473356 - DNA, 25 bp, Artificial
  probe
  misc_feature (1)..(25): SEQ ID NO: 7636; WAN024BPF; Start 404; Stop 428
attcaactgtgtttattcattcgtc

SEQ ID NO: 473357 - DNA, 25 bp, Artificial
  probe
  misc_feature (1)..(25): SEQ ID NO: 7636; WAN024BPF; Start 403; Stop 427
gattcaactgtgtttattcattcgt

SEQ ID NO: 473358 - DNA, 25 bp, Artificial
  probe
  misc_feature (1)..(25): SEQ ID NO: 7636; WAN024BPF; Start 393; Stop 417
gacttggattgattcaactgtgttt

SEQ ID NO: 473359 - DNA, 25 bp, Artificial
  probe
  misc_feature (1)..(25): SEQ ID NO: 7636; WAN024BPF; Start 146; Stop 170
gtaagattgtttggacattgtggtg

SEQ ID NO: 473360 - DNA, 25 bp, Artificial
  probe
  misc_feature (1)..(25): SEQ ID NO: 7636; WAN024BPF; Start 145; Stop 169
agtaagattgtttggacattgtggt

SEQ ID NO: 473361 - DNA, 25 bp, Artificial
  probe
  misc_feature (1)..(25): SEQ ID NO: 7636; WAN024BPF; Start 144; Stop 168
tagtaagattgtttggacattgtgg

SEQ ID NO: 473362 - DNA, 25 bp, Artificial
  probe
  misc_feature (1)..(25): SEQ ID NO: 7636; WAN024BPF; Start 464; Stop 488
caataaagactggtgagatgacaga

SEQ ID NO: 473363 - DNA, 25 bp, Artificial
  probe
  misc_feature (1)..(25): SEQ ID NO: 7636; WAN024BPF; Start 258; Stop 282
ttgtttagatgaatcctcctttgag

SEQ ID NO: 473364 - DNA, 25 bp, Artificial
  probe
  misc_feature (1)..(25): SEQ ID NO: 7636; WAN024BPF; Start 187; Stop 211
gctcctgaaattgtaaagtattgtt

SEQ ID NO: 473365 - DNA, 25 bp, Artificial
  probe
  misc_feature (1)..(25): SEQ ID NO: 7637; WAN024E2R; Start 87; Stop 111
ctacaatagcgtcaatctcactagc

SEQ ID NO: 473366 - DNA, 25 bp, Artificial
  probe
  misc_feature (1)..(25): SEQ ID NO: 7637; WAN024E2R; Start 120; Stop 144
gataagcaaccttgtaatcagacac

SEQ ID NO: 473367 - DNA, 25 bp, Artificial
  probe
  misc_feature (1)..(25): SEQ ID NO: 7637; WAN024E2R; Start 119; Stop 143
ggataagcaaccttgtaatcagaca

SEQ ID NO: 473368 - DNA, 25 bp, Artificial
  probe
  misc_feature (1)..(25): SEQ ID NO: 7637; WAN024E2R; Start 88; Stop 112
tacaatagcgtcaatctcactagca

SEQ ID NO: 473369 - DNA, 25 bp, Artificial
  probe
  misc_feature (1)..(25): SEQ ID NO: 7637; WAN024E2R; Start 121; Stop 145
ataagcaaccttgtaatcagacacc

SEQ ID NO: 473370 - DNA, 25 bp, Artificial
  probe
  misc_feature (1)..(25): SEQ ID NO: 7637; WAN024E2R; Start 7; Stop 31
cgaattacgagttgcttgagagaag

SEQ ID NO: 473371 - DNA, 25 bp, Artificial
  probe
  misc_feature (1)..(25): SEQ ID NO: 7637; WAN024E2R; Start 90; Stop 114
caatagcgtcaatctcactagcaac

SEQ ID NO: 473372 - DNA, 25 bp, Artificial
  probe
  misc_feature (1)..(25): SEQ ID NO: 7637; WAN024E2R; Start 92; Stop 116
atagcgtcaatctcactagcaactt

SEQ ID NO: 473373 - DNA, 25 bp, Artificial
  probe
  misc_feature (1)..(25): SEQ ID NO: 7637; WAN024E2R; Start 91; Stop 115
aatagcgtcaatctcactagcaact

SEQ ID NO: 473374 - DNA, 25 bp, Artificial
  probe
  misc_feature (1)..(25): SEQ ID NO: 7637; WAN024E2R; Start 205; Stop 229
agaatatacttcctctggtacttca

SEQ ID NO: 473375 - DNA, 25 bp, Artificial
  probe
  misc_feature (1)..(25): SEQ ID NO: 7637; WAN024E2R; Start 89; Stop 113
acaatagcgtcaatctcactagcaa

SEQ ID NO: 473376 - DNA, 25 bp, Artificial
  probe
  misc_feature (1)..(25): SEQ ID NO: 7637; WAN024E2R; Start 6; Stop 30
acgaattacgagttgcttgagagaa

SEQ ID NO: 473377 - DNA, 25 bp, Artificial
  probe
  misc_feature (1)..(25): SEQ ID NO: 7637; WAN024E2R; Start 122; Stop 146
taagcaaccttgtaatcagacacca

SEQ ID NO: 473378 - DNA, 25 bp, Artificial
  probe
  misc_feature (1)..(25): SEQ ID NO: 7637; WAN024E2R; Start 93; Stop 117
tagcgtcaatctcactagcaacttc

SEQ ID NO: 473379 - DNA, 25 bp, Artificial
  probe
  misc_feature (1)..(25): SEQ ID NO: 7637; WAN024E2R; Start 206; Stop 230
gaatatacttcctctggtacttcaa

SEQ ID NO: 473380 - DNA, 25 bp, Artificial
  probe
  misc_feature (1)..(25): SEQ ID NO: 7637; WAN024E2R; Start 5; Stop 29
gacgaattacgagttgcttgagaga

SEQ ID NO: 473381 - DNA, 25 bp, Artificial
  probe
  misc_feature (1)..(25): SEQ ID NO: 7637; WAN024E2R; Start 218; Stop 242
tctggtacttcaaatggatcgtaat

SEQ ID NO: 473382 - DNA, 25 bp, Artificial
  probe
  misc_feature (1)..(25): SEQ ID NO: 7637; WAN024E2R; Start 210; Stop 234
atacttcctctggtacttcaaatgg

SEQ ID NO: 473383 - DNA, 25 bp, Artificial
  probe
  misc_feature (1)..(25): SEQ ID NO: 7637; WAN024E2R; Start 217; Stop 241
ctctggtacttcaaatggatcgtaa

SEQ ID NO: 473384 - DNA, 25 bp, Artificial
  probe
  misc_feature (1)..(25): SEQ ID NO: 7637; WAN024E2R; Start 219; Stop 243
ctggtacttcaaatggatcgtaatc

SEQ ID NO: 473385 - DNA, 25 bp, Artificial
  probe
  misc_feature (1)..(25): SEQ ID NO: 7637; WAN024E2R; Start 118; Stop 142
gggataagcaaccttgtaatcagac

SEQ ID NO: 473386 - DNA, 25 bp, Artificial
  probe
  misc_feature (1)..(25): SEQ ID NO: 7637; WAN024E2R; Start 184; Stop 208
cgctacatttgtcttgaaatcagaa

SEQ ID NO: 473387 - DNA, 25 bp, Artificial
  probe
  misc_feature (1)..(25): SEQ ID NO: 7637; WAN024E2R; Start 127; Stop 151
aaccttgtaatcagacaccaaacta

SEQ ID NO: 473388 - DNA, 25 bp, Artificial
  probe
  misc_feature (1)..(25): SEQ ID NO: 7637; WAN024E2R; Start 123; Stop 147
aagcaaccttgtaatcagacaccaa

SEQ ID NO: 473389 - DNA, 25 bp, Artificial
  probe
  misc_feature (1)..(25): SEQ ID NO: 7637; WAN024E2R; Start 114; Stop 138
cttcgggataagcaaccttgtaatc

SEQ ID NO: 473390 - DNA, 25 bp, Artificial
  probe
  misc_feature (1)..(25): SEQ ID NO: 7637; WAN024E2R; Start 100; Stop 124
aatctcactagcaacttcgggataa

SEQ ID NO: 473391 - DNA, 25 bp, Artificial
  probe
  misc_feature (1)..(25): SEQ ID NO: 7637; WAN024E2R; Start 181; Stop 205
atccgctacatttgtcttgaaatca

SEQ ID NO: 473392 - DNA, 25 bp, Artificial
  probe
  misc_feature (1)..(25): SEQ ID NO: 7637; WAN024E2R; Start 128; Stop 152
accttgtaatcagacaccaaactag

SEQ ID NO: 473393 - DNA, 25 bp, Artificial
  probe
  misc_feature (1)..(25): SEQ ID NO: 7637; WAN024E2R; Start 126; Stop 150
caaccttgtaatcagacaccaaact

SEQ ID NO: 473394 - DNA, 25 bp, Artificial
  probe
  misc_feature (1)..(25): SEQ ID NO: 7637; WAN024E2R; Start 180; Stop 204
gatccgctacatttgtcttgaaatc

SEQ ID NO: 473395 - DNA, 25 bp, Artificial
  probe
  misc_feature (1)..(25): SEQ ID NO: 7637; WAN024E2R; Start 216; Stop 240
cctctggtacttcaaatggatcgta

SEQ ID NO: 473396 - DNA, 25 bp, Artificial
  probe
  misc_feature (1)..(25): SEQ ID NO: 7637; WAN024E2R; Start 115; Stop 139
ttcgggataagcaaccttgtaatca

SEQ ID NO: 473397 - DNA, 25 bp, Artificial
  probe
  misc_feature (1)..(25): SEQ ID NO: 7637; WAN024E2R; Start 113; Stop 137
acttcgggataagcaaccttgtaat

SEQ ID NO: 473398 - DNA, 25 bp, Artificial
  probe
  misc_feature (1)..(25): SEQ ID NO: 7638; WAN024GNB; Start 184; Stop 208
aatctgatggtaactattgggaacg

SEQ ID NO: 473399 - DNA, 25 bp, Artificial
  probe
  misc_feature (1)..(25): SEQ ID NO: 7638; WAN024GNB; Start 183; Stop 207
aaatctgatggtaactattgggaac

SEQ ID NO: 473400 - DNA, 25 bp, Artificial
  probe
  misc_feature (1)..(25): SEQ ID NO: 7638; WAN024GNB; Start 207; Stop 231
cgtgattccaggaaaccatattaat

SEQ ID NO: 473401 - DNA, 25 bp, Artificial
  probe
  misc_feature (1)..(25): SEQ ID NO: 7638; WAN024GNB; Start 206; Stop 230
acgtgattccaggaaaccatattaa

SEQ ID NO: 473402 - DNA, 25 bp, Artificial
  probe
  misc_feature (1)..(25): SEQ ID NO: 7638; WAN024GNB; Start 205; Stop 229
aacgtgattccaggaaaccatatta

SEQ ID NO: 473403 - DNA, 25 bp, Artificial
  probe
  misc_feature (1)..(25): SEQ ID NO: 7638; WAN024GNB; Start 189; Stop 213
gatggtaactattgggaacgtgatt

SEQ ID NO: 473404 - DNA, 25 bp, Artificial
  probe
  misc_feature (1)..(25): SEQ ID NO: 7638; WAN024GNB; Start 190; Stop 214
atggtaactattgggaacgtgattc

SEQ ID NO: 473405 - DNA, 25 bp, Artificial
  probe
  misc_feature (1)..(25): SEQ ID NO: 7638; WAN024GNB; Start 185; Stop 209
atctgatggtaactattgggaacgt

SEQ ID NO: 473406 - DNA, 25 bp, Artificial
  probe
  misc_feature (1)..(25): SEQ ID NO: 7638; WAN024GNB; Start 204; Stop 228
gaacgtgattccaggaaaccatatt

SEQ ID NO: 473407 - DNA, 25 bp, Artificial
  probe
  misc_feature (1)..(25): SEQ ID NO: 7638; WAN024GNB; Start 188; Stop 212
tgatggtaactattgggaacgtgat

SEQ ID NO: 473408 - DNA, 25 bp, Artificial
  probe
  misc_feature (1)..(25): SEQ ID NO: 7638; WAN024GNB; Start 120; Stop 144
tgtaggagatgtgaaattagatcaa

SEQ ID NO: 473409 - DNA, 25 bp, Artificial
  probe
  misc_feature (1)..(25): SEQ ID NO: 7638; WAN024GNB; Start 187; Stop 211
ctgatggtaactattgggaacgtga

SEQ ID NO: 473410 - DNA, 25 bp, Artificial
  probe
  misc_feature (1)..(25): SEQ ID NO: 7638; WAN024GNB; Start 186; Stop 210
tctgatggtaactattgggaacgtg

SEQ ID NO: 473411 - DNA, 25 bp, Artificial
  probe
  misc_feature (1)..(25): SEQ ID NO: 7638; WAN024GNB; Start 123; Stop 147
aggagatgtgaaattagatcaaatc

SEQ ID NO: 473412 - DNA, 25 bp, Artificial
  probe
  misc_feature (1)..(25): SEQ ID NO: 7638; WAN024GNB; Start 121; Stop 145
gtaggagatgtgaaattagatcaaa

SEQ ID NO: 473413 - DNA, 25 bp, Artificial
  probe
  misc_feature (1)..(25): SEQ ID NO: 7638; WAN024GNB; Start 124; Stop 148
ggagatgtgaaattagatcaaatct

SEQ ID NO: 473414 - DNA, 25 bp, Artificial
  probe
  misc_feature (1)..(25): SEQ ID NO: 7638; WAN024GNB; Start 122; Stop 146
taggagatgtgaaattagatcaaat

SEQ ID NO: 473415 - DNA, 25 bp, Artificial
  probe
  misc_feature (1)..(25): SEQ ID NO: 7638; WAN024GNB; Start 193; Stop 217
gtaactattgggaacgtgattccag

SEQ ID NO: 473416 - DNA, 25 bp, Artificial
  probe
  misc_feature (1)..(25): SEQ ID NO: 7638; WAN024GNB; Start 194; Stop 218
taactattgggaacgtgattccagg

SEQ ID NO: 473417 - DNA, 25 bp, Artificial
  probe
  misc_feature (1)..(25): SEQ ID NO: 7638; WAN024GNB; Start 137; Stop 161
tagatcaaatcttacaaggaattga

SEQ ID NO: 473418 - DNA, 25 bp, Artificial
  probe
  misc_feature (1)..(25): SEQ ID NO: 7638; WAN024GNB; Start 192; Stop 216
ggtaactattgggaacgtgattcca

SEQ ID NO: 473419 - DNA, 25 bp, Artificial
  probe
  misc_feature (1)..(25): SEQ ID NO: 7638; WAN024GNB; Start 191; Stop 215
tggtaactattgggaacgtgattcc

SEQ ID NO: 473420 - DNA, 25 bp, Artificial
  probe
  misc_feature (1)..(25): SEQ ID NO: 7638; WAN024GNB; Start 136; Stop 160
ttagatcaaatcttacaaggaattg

SEQ ID NO: 473421 - DNA, 25 bp, Artificial
  probe
  misc_feature (1)..(25): SEQ ID NO: 7638; WAN024GNB; Start 131; Stop 155
tgaaattagatcaaatcttacaagg

SEQ ID NO: 473422 - DNA, 25 bp, Artificial
  probe
  misc_feature (1)..(25): SEQ ID NO: 7638; WAN024GNB; Start 125; Stop 149
gagatgtgaaattagatcaaatctt

SEQ ID NO: 473423 - DNA, 25 bp, Artificial
  probe
  misc_feature (1)..(25): SEQ ID NO: 7638; WAN024GNB; Start 203; Stop 227
ggaacgtgattccaggaaaccatat

SEQ ID NO: 473424 - DNA, 25 bp, Artificial
  probe
  misc_feature (1)..(25): SEQ ID NO: 7638; WAN024GNB; Start 197; Stop 221
ctattgggaacgtgattccaggaaa

SEQ ID NO: 473425 - DNA, 25 bp, Artificial
  probe
  misc_feature (1)..(25): SEQ ID NO: 7638; WAN024GNB; Start 198; Stop 222
tattgggaacgtgattccaggaaac

SEQ ID NO: 473426 - DNA, 25 bp, Artificial
  probe
  misc_feature (1)..(25): SEQ ID NO: 7638; WAN024GNB; Start 132; Stop 156
gaaattagatcaaatcttacaagga

SEQ ID NO: 473427 - DNA, 25 bp, Artificial
  probe
  misc_feature (1)..(25): SEQ ID NO: 7638; WAN024GNB; Start 129; Stop 153
tgtgaaattagatcaaatcttacaa

SEQ ID NO: 473428 - DNA, 25 bp, Artificial
  probe
  misc_feature (1)..(25): SEQ ID NO: 7638; WAN024GNB; Start 196; Stop 220
actattgggaacgtgattccaggaa

SEQ ID NO: 473429 - DNA, 25 bp, Artificial
  probe
  misc_feature (1)..(25): SEQ ID NO: 7638; WAN024GNB; Start 195; Stop 219
aactattgggaacgtgattccagga

SEQ ID NO: 473430 - DNA, 25 bp, Artificial
  probe
  misc_feature (1)..(25): SEQ ID NO: 7638; WAN024GNB; Start 138; Stop 162
agatcaaatcttacaaggaattgat

SEQ ID NO: 473431 - DNA, 25 bp, Artificial
  probe
  misc_feature (1)..(25): SEQ ID NO: 7639; WAN024DR3; Start 58; Stop 82
tttctttcaacttcgccaattcctg

SEQ ID NO: 473432 - DNA, 25 bp, Artificial
  probe
  misc_feature (1)..(25): SEQ ID NO: 7639; WAN024DR3; Start 59; Stop 83
ttctttcaacttcgccaattcctgt

SEQ ID NO: 473433 - DNA, 25 bp, Artificial
  probe
  misc_feature (1)..(25): SEQ ID NO: 7639; WAN024DR3; Start 38; Stop 62
ctggttttgttctgtctagttttct

SEQ ID NO: 473434 - DNA, 25 bp, Artificial
  probe
  misc_feature (1)..(25): SEQ ID NO: 7639; WAN024DR3; Start 37; Stop 61
gctggttttgttctgtctagttttc

SEQ ID NO: 473435 - DNA, 25 bp, Artificial
  probe
  misc_feature (1)..(25): SEQ ID NO: 7639; WAN024DR3; Start 39; Stop 63
tggttttgttctgtctagttttctt

SEQ ID NO: 473436 - DNA, 25 bp, Artificial
  probe
  misc_feature (1)..(25): SEQ ID NO: 7639; WAN024DR3; Start 57; Stop 81
ttttctttcaacttcgccaattcct

SEQ ID NO: 473437 - DNA, 25 bp, Artificial
  probe
  misc_feature (1)..(25): SEQ ID NO: 7639; WAN024DR3; Start 60; Stop 84
tctttcaacttcgccaattcctgtg

SEQ ID NO: 473438 - DNA, 25 bp, Artificial
  probe
  misc_feature (1)..(25): SEQ ID NO: 7639; WAN024DR3; Start 56; Stop 80
gttttctttcaacttcgccaattcc

SEQ ID NO: 473439 - DNA, 25 bp, Artificial
  probe
  misc_feature (1)..(25): SEQ ID NO: 7639; WAN024DR3; Start 40; Stop 64
ggttttgttctgtctagttttcttt

SEQ ID NO: 473440 - DNA, 25 bp, Artificial
  probe
  misc_feature (1)..(25): SEQ ID NO: 7639; WAN024DR3; Start 36; Stop 60
ggctggttttgttctgtctagtttt

SEQ ID NO: 473441 - DNA, 25 bp, Artificial
  probe
  misc_feature (1)..(25): SEQ ID NO: 7639; WAN024DR3; Start 31; Stop 55
cttagggctggttttgttctgtcta

SEQ ID NO: 473442 - DNA, 25 bp, Artificial
  probe
  misc_feature (1)..(25): SEQ ID NO: 7639; WAN024DR3; Start 44; Stop 68
ttgttctgtctagttttctttcaac

SEQ ID NO: 473443 - DNA, 25 bp, Artificial
  probe
  misc_feature (1)..(25): SEQ ID NO: 7639; WAN024DR3; Start 32; Stop 56
ttagggctggttttgttctgtctag

SEQ ID NO: 473444 - DNA, 25 bp, Artificial
  probe
  misc_feature (1)..(25): SEQ ID NO: 7639; WAN024DR3; Start 42; Stop 66
ttttgttctgtctagttttctttca

SEQ ID NO: 473445 - DNA, 25 bp, Artificial
  probe
  misc_feature (1)..(25): SEQ ID NO: 7639; WAN024DR3; Start 41; Stop 65
gttttgttctgtctagttttctttc

SEQ ID NO: 473446 - DNA, 25 bp, Artificial
  probe
  misc_feature (1)..(25): SEQ ID NO: 7639; WAN024DR3; Start 43; Stop 67
tttgttctgtctagttttctttcaa

SEQ ID NO: 473447 - DNA, 25 bp, Artificial
  probe
  misc_feature (1)..(25): SEQ ID NO: 7639; WAN024DR3; Start 35; Stop 59
gggctggttttgttctgtctagttt

SEQ ID NO: 473448 - DNA, 25 bp, Artificial
  probe
  misc_feature (1)..(25): SEQ ID NO: 7639; WAN024DR3; Start 33; Stop 57
tagggctggttttgttctgtctagt

SEQ ID NO: 473449 - DNA, 25 bp, Artificial
  probe
  misc_feature (1)..(25): SEQ ID NO: 7639; WAN024DR3; Start 54; Stop 78
tagttttctttcaacttcgccaatt

SEQ ID NO: 473450 - DNA, 25 bp, Artificial
  probe
  misc_feature (1)..(25): SEQ ID NO: 7639; WAN024DR3; Start 53; Stop 77
ctagttttctttcaacttcgccaat

SEQ ID NO: 473451 - DNA, 25 bp, Artificial
  probe
  misc_feature (1)..(25): SEQ ID NO: 7639; WAN024DR3; Start 49; Stop 73
ctgtctagttttctttcaacttcgc

SEQ ID NO: 473452 - DNA, 25 bp, Artificial
  probe
  misc_feature (1)..(25): SEQ ID NO: 7639; WAN024DR3; Start 48; Stop 72
tctgtctagttttctttcaacttcg

SEQ ID NO: 473453 - DNA, 25 bp, Artificial
  probe
  misc_feature (1)..(25): SEQ ID NO: 7639; WAN024DR3; Start 55; Stop 79
agttttctttcaacttcgccaattc

SEQ ID NO: 473454 - DNA, 25 bp, Artificial
  probe
  misc_feature (1)..(25): SEQ ID NO: 7639; WAN024DR3; Start 52; Stop 76
tctagttttctttcaacttcgccaa

SEQ ID NO: 473455 - DNA, 25 bp, Artificial
  probe
  misc_feature (1)..(25): SEQ ID NO: 7639; WAN024DR3; Start 45; Stop 69
tgttctgtctagttttctttcaact

SEQ ID NO: 473456 - DNA, 25 bp, Artificial
  probe
  misc_feature (1)..(25): SEQ ID NO: 7639; WAN024DR3; Start 51; Stop 75
gtctagttttctttcaacttcgcca

SEQ ID NO: 473457 - DNA, 25 bp, Artificial
  probe
  misc_feature (1)..(25): SEQ ID NO: 7639; WAN024DR3; Start 50; Stop 74
tgtctagttttctttcaacttcgcc

SEQ ID NO: 473458 - DNA, 25 bp, Artificial
  probe
  misc_feature (1)..(25): SEQ ID NO: 7639; WAN024DR3; Start 34; Stop 58
agggctggttttgttctgtctagtt

SEQ ID NO: 473459 - DNA, 25 bp, Artificial
  probe
  misc_feature (1)..(25): SEQ ID NO: 7639; WAN024DR3; Start 46; Stop 70
gttctgtctagttttctttcaactt

SEQ ID NO: 473460 - DNA, 25 bp, Artificial
  probe
  misc_feature (1)..(25): SEQ ID NO: 7639; WAN024DR3; Start 47; Stop 71
ttctgtctagttttctttcaacttc

SEQ ID NO: 473461 - DNA, 25 bp, Artificial
  probe
  misc_feature (1)..(25): SEQ ID NO: 7639; WAN024DR3; Start 30; Stop 54
ccttagggctggttttgttctgtct

SEQ ID NO: 473462 - DNA, 25 bp, Artificial
  probe
  misc_feature (1)..(25): SEQ ID NO: 7639; WAN024DR3; Start 29; Stop 53
accttagggctggttttgttctgtc

SEQ ID NO: 473463 - DNA, 25 bp, Artificial
  probe
  misc_feature (1)..(25): SEQ ID NO: 7639; WAN024DR3; Start 27; Stop 51
caaccttagggctggttttgttctg

SEQ ID NO: 473464 - DNA, 25 bp, Artificial
  probe
  misc_feature (1)..(25): SEQ ID NO: 7640; WAN024ES2; Start 126; Stop 150
tcaaccactccattctcataaggaa

SEQ ID NO: 473465 - DNA, 25 bp, Artificial
  probe
  misc_feature (1)..(25): SEQ ID NO: 7640; WAN024ES2; Start 125; Stop 149
ttcaaccactccattctcataagga

SEQ ID NO: 473466 - DNA, 25 bp, Artificial
  probe
  misc_feature (1)..(25): SEQ ID NO: 7640; WAN024ES2; Start 115; Stop 139
atattctcctttcaaccactccatt

SEQ ID NO: 473467 - DNA, 25 bp, Artificial
  probe
  misc_feature (1)..(25): SEQ ID NO: 7640; WAN024ES2; Start 114; Stop 138
gatattctcctttcaaccactccat

SEQ ID NO: 473468 - DNA, 25 bp, Artificial
  probe
  misc_feature (1)..(25): SEQ ID NO: 7640; WAN024ES2; Start 116; Stop 140
tattctcctttcaaccactccattc

SEQ ID NO: 473469 - DNA, 25 bp, Artificial
  probe
  misc_feature (1)..(25): SEQ ID NO: 7640; WAN024ES2; Start 124; Stop 148
tttcaaccactccattctcataagg

SEQ ID NO: 473470 - DNA, 25 bp, Artificial
  probe
  misc_feature (1)..(25): SEQ ID NO: 7640; WAN024ES2; Start 122; Stop 146
cctttcaaccactccattctcataa

SEQ ID NO: 473471 - DNA, 25 bp, Artificial
  probe
  misc_feature (1)..(25): SEQ ID NO: 7640; WAN024ES2; Start 219; Stop 243
accaacctgtaaacatttccactaa

SEQ ID NO: 473472 - DNA, 25 bp, Artificial
  probe
  misc_feature (1)..(25): SEQ ID NO: 7640; WAN024ES2; Start 218; Stop 242
aaccaacctgtaaacatttccacta

SEQ ID NO: 473473 - DNA, 25 bp, Artificial
  probe
  misc_feature (1)..(25): SEQ ID NO: 7640; WAN024ES2; Start 123; Stop 147
ctttcaaccactccattctcataag

SEQ ID NO: 473474 - DNA, 25 bp, Artificial
  probe
  misc_feature (1)..(25): SEQ ID NO: 7640; WAN024ES2; Start 214; Stop 238
gtcaaaccaacctgtaaacatttcc

SEQ ID NO: 473475 - DNA, 25 bp, Artificial
  probe
  misc_feature (1)..(25): SEQ ID NO: 7640; WAN024ES2; Start 121; Stop 145
tcctttcaaccactccattctcata

SEQ ID NO: 473476 - DNA, 25 bp, Artificial
  probe
  misc_feature (1)..(25): SEQ ID NO: 7640; WAN024ES2; Start 217; Stop 241
aaaccaacctgtaaacatttccact

SEQ ID NO: 473477 - DNA, 25 bp, Artificial
  probe
  misc_feature (1)..(25): SEQ ID NO: 7640; WAN024ES2; Start 216; Stop 240
caaaccaacctgtaaacatttccac

SEQ ID NO: 473478 - DNA, 25 bp, Artificial
  probe
  misc_feature (1)..(25): SEQ ID NO: 7640; WAN024ES2; Start 215; Stop 239
tcaaaccaacctgtaaacatttcca

SEQ ID NO: 473479 - DNA, 25 bp, Artificial
  probe
  misc_feature (1)..(25): SEQ ID NO: 7640; WAN024ES2; Start 112; Stop 136
atgatattctcctttcaaccactcc

SEQ ID NO: 473480 - DNA, 25 bp, Artificial
  probe
  misc_feature (1)..(25): SEQ ID NO: 7640; WAN024ES2; Start 117; Stop 141
attctcctttcaaccactccattct

SEQ ID NO: 473481 - DNA, 25 bp, Artificial
  probe
  misc_feature (1)..(25): SEQ ID NO: 7640; WAN024ES2; Start 113; Stop 137
tgatattctcctttcaaccactcca

SEQ ID NO: 473482 - DNA, 25 bp, Artificial
  probe
  misc_feature (1)..(25): SEQ ID NO: 7640; WAN024ES2; Start 111; Stop 135
catgatattctcctttcaaccactc

SEQ ID NO: 473483 - DNA, 25 bp, Artificial
  probe
  misc_feature (1)..(25): SEQ ID NO: 7640; WAN024ES2; Start 120; Stop 144
ctcctttcaaccactccattctcat

SEQ ID NO: 473484 - DNA, 25 bp, Artificial
  probe
  misc_feature (1)..(25): SEQ ID NO: 7640; WAN024ES2; Start 118; Stop 142
ttctcctttcaaccactccattctc

SEQ ID NO: 473485 - DNA, 25 bp, Artificial
  probe
  misc_feature (1)..(25): SEQ ID NO: 7640; WAN024ES2; Start 127; Stop 151
caaccactccattctcataaggaaa

SEQ ID NO: 473486 - DNA, 25 bp, Artificial
  probe
  misc_feature (1)..(25): SEQ ID NO: 7640; WAN024ES2; Start 213; Stop 237
ggtcaaaccaacctgtaaacatttc

SEQ ID NO: 473487 - DNA, 25 bp, Artificial
  probe
  misc_feature (1)..(25): SEQ ID NO: 7640; WAN024ES2; Start 119; Stop 143
tctcctttcaaccactccattctca

SEQ ID NO: 473488 - DNA, 25 bp, Artificial
  probe
  misc_feature (1)..(25): SEQ ID NO: 7640; WAN024ES2; Start 140; Stop 164
ctcataaggaaaacgacgaaaatca

SEQ ID NO: 473489 - DNA, 25 bp, Artificial
  probe
  misc_feature (1)..(25): SEQ ID NO: 7640; WAN024ES2; Start 139; Stop 163
tctcataaggaaaacgacgaaaatc

SEQ ID NO: 473490 - DNA, 25 bp, Artificial
  probe
  misc_feature (1)..(25): SEQ ID NO: 7640; WAN024ES2; Start 29; Stop 53
cttcagctacctcaaaggaaatacc

SEQ ID NO: 473491 - DNA, 25 bp, Artificial
  probe
  misc_feature (1)..(25): SEQ ID NO: 7640; WAN024ES2; Start 89; Stop 113
ggctttctaccttaatcatattcat

SEQ ID NO: 473492 - DNA, 25 bp, Artificial
  probe
  misc_feature (1)..(25): SEQ ID NO: 7640; WAN024ES2; Start 88; Stop 112
aggctttctaccttaatcatattca

SEQ ID NO: 473493 - DNA, 25 bp, Artificial
  probe
  misc_feature (1)..(25): SEQ ID NO: 7640; WAN024ES2; Start 141; Stop 165
tcataaggaaaacgacgaaaatcat

SEQ ID NO: 473494 - DNA, 25 bp, Artificial
  probe
  misc_feature (1)..(25): SEQ ID NO: 7640; WAN024ES2; Start 136; Stop 160
cattctcataaggaaaacgacgaaa

SEQ ID NO: 473495 - DNA, 25 bp, Artificial
  probe
  misc_feature (1)..(25): SEQ ID NO: 7640; WAN024ES2; Start 138; Stop 162
ttctcataaggaaaacgacgaaaat

SEQ ID NO: 473496 - DNA, 25 bp, Artificial
  probe
  misc_feature (1)..(25): SEQ ID NO: 7640; WAN024ES2; Start 137; Stop 161
attctcataaggaaaacgacgaaaa

SEQ ID NO: 473497 - DNA, 25 bp, Artificial
  probe
  misc_feature (1)..(25): SEQ ID NO: 7641; WAN024G7L; Start 157; Stop 181
attcttctggctattctctactgct

SEQ ID NO: 473498 - DNA, 25 bp, Artificial
  probe
  misc_feature (1)..(25): SEQ ID NO: 7641; WAN024G7L; Start 156; Stop 180
cattcttctggctattctctactgc

SEQ ID NO: 473499 - DNA, 25 bp, Artificial
  probe
  misc_feature (1)..(25): SEQ ID NO: 7641; WAN024G7L; Start 155; Stop 179
gcattcttctggctattctctactg

SEQ ID NO: 473500 - DNA, 25 bp, Artificial
  probe
  misc_feature (1)..(25): SEQ ID NO: 7641; WAN024G7L; Start 158; Stop 182
ttcttctggctattctctactgctt

SEQ ID NO: 473501 - DNA, 25 bp, Artificial
  probe
  misc_feature (1)..(25): SEQ ID NO: 7641; WAN024G7L; Start 160; Stop 184
cttctggctattctctactgcttct

SEQ ID NO: 473502 - DNA, 25 bp, Artificial
  probe
  misc_feature (1)..(25): SEQ ID NO: 7641; WAN024G7L; Start 159; Stop 183
tcttctggctattctctactgcttc

SEQ ID NO: 473503 - DNA, 25 bp, Artificial
  probe
  misc_feature (1)..(25): SEQ ID NO: 7641; WAN024G7L; Start 161; Stop 185
ttctggctattctctactgcttctg

SEQ ID NO: 473504 - DNA, 25 bp, Artificial
  probe
  misc_feature (1)..(25): SEQ ID NO: 7641; WAN024G7L; Start 186; Stop 210
gaatcagttcaacaccgtagacttc

SEQ ID NO: 473505 - DNA, 25 bp, Artificial
  probe
  misc_feature (1)..(25): SEQ ID NO: 7641; WAN024G7L; Start 188; Stop 212
atcagttcaacaccgtagacttctt

SEQ ID NO: 473506 - DNA, 25 bp, Artificial
  probe
  misc_feature (1)..(25): SEQ ID NO: 7641; WAN024G7L; Start 187; Stop 211
aatcagttcaacaccgtagacttct

SEQ ID NO: 473507 - DNA, 25 bp, Artificial
  probe
  misc_feature (1)..(25): SEQ ID NO: 7641; WAN024G7L; Start 168; Stop 192
tattctctactgcttctggaatcag

SEQ ID NO: 473508 - DNA, 25 bp, Artificial
  probe
  misc_feature (1)..(25): SEQ ID NO: 7641; WAN024G7L; Start 167; Stop 191
ctattctctactgcttctggaatca

SEQ ID NO: 473509 - DNA, 25 bp, Artificial
  probe
  misc_feature (1)..(25): SEQ ID NO: 7641; WAN024G7L; Start 56; Stop 80
aagataacggttggttgaatacctt

SEQ ID NO: 473510 - DNA, 25 bp, Artificial
  probe
  misc_feature (1)..(25): SEQ ID NO: 7641; WAN024G7L; Start 166; Stop 190
gctattctctactgcttctggaatc

SEQ ID NO: 473511 - DNA, 25 bp, Artificial
  probe
  misc_feature (1)..(25): SEQ ID NO: 7641; WAN024G7L; Start 57; Stop 81
agataacggttggttgaataccttc

SEQ ID NO: 473512 - DNA, 25 bp, Artificial
  probe
  misc_feature (1)..(25): SEQ ID NO: 7641; WAN024G7L; Start 55; Stop 79
caagataacggttggttgaatacct

SEQ ID NO: 473513 - DNA, 25 bp, Artificial
  probe
  misc_feature (1)..(25): SEQ ID NO: 7641; WAN024G7L; Start 118; Stop 142
acagacatagtgggcattagtaatc

SEQ ID NO: 473514 - DNA, 25 bp, Artificial
  probe
  misc_feature (1)..(25): SEQ ID NO: 7641; WAN024G7L; Start 125; Stop 149
tagtgggcattagtaatcttgttca

SEQ ID NO: 473515 - DNA, 25 bp, Artificial
  probe
  misc_feature (1)..(25): SEQ ID NO: 7641; WAN024G7L; Start 127; Stop 151
gtgggcattagtaatcttgttcaaa

SEQ ID NO: 473516 - DNA, 25 bp, Artificial
  probe
  misc_feature (1)..(25): SEQ ID NO: 7641; WAN024G7L; Start 126; Stop 150
agtgggcattagtaatcttgttcaa

SEQ ID NO: 473517 - DNA, 25 bp, Artificial
  probe
  misc_feature (1)..(25): SEQ ID NO: 7641; WAN024G7L; Start 121; Stop 145
gacatagtgggcattagtaatcttg

SEQ ID NO: 473518 - DNA, 25 bp, Artificial
  probe
  misc_feature (1)..(25): SEQ ID NO: 7641; WAN024G7L; Start 73; Stop 97
aataccttccttgagccatttcttc

SEQ ID NO: 473519 - DNA, 25 bp, Artificial
  probe
  misc_feature (1)..(25): SEQ ID NO: 7641; WAN024G7L; Start 128; Stop 152
tgggcattagtaatcttgttcaaag

SEQ ID NO: 473520 - DNA, 25 bp, Artificial
  probe
  misc_feature (1)..(25): SEQ ID NO: 7641; WAN024G7L; Start 119; Stop 143
cagacatagtgggcattagtaatct

SEQ ID NO: 473521 - DNA, 25 bp, Artificial
  probe
  misc_feature (1)..(25): SEQ ID NO: 7641; WAN024G7L; Start 123; Stop 147
catagtgggcattagtaatcttgtt

SEQ ID NO: 473522 - DNA, 25 bp, Artificial
  probe
  misc_feature (1)..(25): SEQ ID NO: 7641; WAN024G7L; Start 58; Stop 82
gataacggttggttgaataccttcc

SEQ ID NO: 473523 - DNA, 25 bp, Artificial
  probe
  misc_feature (1)..(25): SEQ ID NO: 7641; WAN024G7L; Start 185; Stop 209
ggaatcagttcaacaccgtagactt

SEQ ID NO: 473524 - DNA, 25 bp, Artificial
  probe
  misc_feature (1)..(25): SEQ ID NO: 7641; WAN024G7L; Start 120; Stop 144
agacatagtgggcattagtaatctt

SEQ ID NO: 473525 - DNA, 25 bp, Artificial
  probe
  misc_feature (1)..(25): SEQ ID NO: 7641; WAN024G7L; Start 72; Stop 96
gaataccttccttgagccatttctt

SEQ ID NO: 473526 - DNA, 25 bp, Artificial
  probe
  misc_feature (1)..(25): SEQ ID NO: 7641; WAN024G7L; Start 164; Stop 188
tggctattctctactgcttctggaa

SEQ ID NO: 473527 - DNA, 25 bp, Artificial
  probe
  misc_feature (1)..(25): SEQ ID NO: 7641; WAN024G7L; Start 124; Stop 148
atagtgggcattagtaatcttgttc

SEQ ID NO: 473528 - DNA, 25 bp, Artificial
  probe
  misc_feature (1)..(25): SEQ ID NO: 7641; WAN024G7L; Start 70; Stop 94
ttgaataccttccttgagccatttc

SEQ ID NO: 473529 - DNA, 25 bp, Artificial
  probe
  misc_feature (1)..(25): SEQ ID NO: 7641; WAN024G7L; Start 153; Stop 177
aagcattcttctggctattctctac

SEQ ID NO: 473530 - DNA, 25 bp, Artificial
  probe
  misc_feature (1)..(25): SEQ ID NO: 7642; WAN024FFQ; Start 29; Stop 53
agattgacctcttcatcatacagaa

SEQ ID NO: 473531 - DNA, 25 bp, Artificial
  probe
  misc_feature (1)..(25): SEQ ID NO: 7642; WAN024FFQ; Start 135; Stop 159
ctgctgtctttctctttggattaac

SEQ ID NO: 473532 - DNA, 25 bp, Artificial
  probe
  misc_feature (1)..(25): SEQ ID NO: 7642; WAN024FFQ; Start 134; Stop 158
tctgctgtctttctctttggattaa

SEQ ID NO: 473533 - DNA, 25 bp, Artificial
  probe
  misc_feature (1)..(25): SEQ ID NO: 7642; WAN024FFQ; Start 133; Stop 157
atctgctgtctttctctttggatta

SEQ ID NO: 473534 - DNA, 25 bp, Artificial
  probe
  misc_feature (1)..(25): SEQ ID NO: 7642; WAN024FFQ; Start 136; Stop 160
tgctgtctttctctttggattaact

SEQ ID NO: 473535 - DNA, 25 bp, Artificial
  probe
  misc_feature (1)..(25): SEQ ID NO: 7642; WAN024FFQ; Start 137; Stop 161
gctgtctttctctttggattaactt

SEQ ID NO: 473536 - DNA, 25 bp, Artificial
  probe
  misc_feature (1)..(25): SEQ ID NO: 7642; WAN024FFQ; Start 38; Stop 62
tcttcatcatacagaaagtcttgct

SEQ ID NO: 473537 - DNA, 25 bp, Artificial
  probe
  misc_feature (1)..(25): SEQ ID NO: 7642; WAN024FFQ; Start 37; Stop 61
ctcttcatcatacagaaagtcttgc

SEQ ID NO: 473538 - DNA, 25 bp, Artificial
  probe
  misc_feature (1)..(25): SEQ ID NO: 7642; WAN024FFQ; Start 35; Stop 59
acctcttcatcatacagaaagtctt

SEQ ID NO: 473539 - DNA, 25 bp, Artificial
  probe
  misc_feature (1)..(25): SEQ ID NO: 7642; WAN024FFQ; Start 36; Stop 60
cctcttcatcatacagaaagtcttg

SEQ ID NO: 473540 - DNA, 25 bp, Artificial
  probe
  misc_feature (1)..(25): SEQ ID NO: 7642; WAN024FFQ; Start 32; Stop 56
ttgacctcttcatcatacagaaagt

SEQ ID NO: 473541 - DNA, 25 bp, Artificial
  probe
  misc_feature (1)..(25): SEQ ID NO: 7642; WAN024FFQ; Start 128; Stop 152
gattgatctgctgtctttctctttg

SEQ ID NO: 473542 - DNA, 25 bp, Artificial
  probe
  misc_feature (1)..(25): SEQ ID NO: 7642; WAN024FFQ; Start 41; Stop 65
tcatcatacagaaagtcttgctagt

SEQ ID NO: 473543 - DNA, 25 bp, Artificial
  probe
  misc_feature (1)..(25): SEQ ID NO: 7642; WAN024FFQ; Start 28; Stop 52
aagattgacctcttcatcatacaga

SEQ ID NO: 473544 - DNA, 25 bp, Artificial
  probe
  misc_feature (1)..(25): SEQ ID NO: 7642; WAN024FFQ; Start 39; Stop 63
cttcatcatacagaaagtcttgcta

SEQ ID NO: 473545 - DNA, 25 bp, Artificial
  probe
  misc_feature (1)..(25): SEQ ID NO: 7642; WAN024FFQ; Start 127; Stop 151
ggattgatctgctgtctttctcttt

SEQ ID NO: 473546 - DNA, 25 bp, Artificial
  probe
  misc_feature (1)..(25): SEQ ID NO: 7642; WAN024FFQ; Start 132; Stop 156
gatctgctgtctttctctttggatt

SEQ ID NO: 473547 - DNA, 25 bp, Artificial
  probe
  misc_feature (1)..(25): SEQ ID NO: 7642; WAN024FFQ; Start 42; Stop 66
catcatacagaaagtcttgctagtt

SEQ ID NO: 473548 - DNA, 25 bp, Artificial
  probe
  misc_feature (1)..(25): SEQ ID NO: 7642; WAN024FFQ; Start 129; Stop 153
attgatctgctgtctttctctttgg

SEQ ID NO: 473549 - DNA, 25 bp, Artificial
  probe
  misc_feature (1)..(25): SEQ ID NO: 7642; WAN024FFQ; Start 124; Stop 148
tttggattgatctgctgtctttctc

SEQ ID NO: 473550 - DNA, 25 bp, Artificial
  probe
  misc_feature (1)..(25): SEQ ID NO: 7642; WAN024FFQ; Start 34; Stop 58
gacctcttcatcatacagaaagtct

SEQ ID NO: 473551 - DNA, 25 bp, Artificial
  probe
  misc_feature (1)..(25): SEQ ID NO: 7642; WAN024FFQ; Start 33; Stop 57
tgacctcttcatcatacagaaagtc

SEQ ID NO: 473552 - DNA, 25 bp, Artificial
  probe
  misc_feature (1)..(25): SEQ ID NO: 7642; WAN024FFQ; Start 31; Stop 55
attgacctcttcatcatacagaaag

SEQ ID NO: 473553 - DNA, 25 bp, Artificial
  probe
  misc_feature (1)..(25): SEQ ID NO: 7642; WAN024FFQ; Start 30; Stop 54
gattgacctcttcatcatacagaaa

SEQ ID NO: 473554 - DNA, 25 bp, Artificial
  probe
  misc_feature (1)..(25): SEQ ID NO: 7642; WAN024FFQ; Start 40; Stop 64
ttcatcatacagaaagtcttgctag

SEQ ID NO: 473555 - DNA, 25 bp, Artificial
  probe
  misc_feature (1)..(25): SEQ ID NO: 7642; WAN024FFQ; Start 43; Stop 67
atcatacagaaagtcttgctagttt

SEQ ID NO: 473556 - DNA, 25 bp, Artificial
  probe
  misc_feature (1)..(25): SEQ ID NO: 7642; WAN024FFQ; Start 126; Stop 150
tggattgatctgctgtctttctctt

SEQ ID NO: 473557 - DNA, 25 bp, Artificial
  probe
  misc_feature (1)..(25): SEQ ID NO: 7642; WAN024FFQ; Start 125; Stop 149
ttggattgatctgctgtctttctct

SEQ ID NO: 473558 - DNA, 25 bp, Artificial
  probe
  misc_feature (1)..(25): SEQ ID NO: 7642; WAN024FFQ; Start 131; Stop 155
tgatctgctgtctttctctttggat

SEQ ID NO: 473559 - DNA, 25 bp, Artificial
  probe
  misc_feature (1)..(25): SEQ ID NO: 7642; WAN024FFQ; Start 130; Stop 154
ttgatctgctgtctttctctttgga

SEQ ID NO: 473560 - DNA, 25 bp, Artificial
  probe
  misc_feature (1)..(25): SEQ ID NO: 7642; WAN024FFQ; Start 138; Stop 162
ctgtctttctctttggattaactta

SEQ ID NO: 473561 - DNA, 25 bp, Artificial
  probe
  misc_feature (1)..(25): SEQ ID NO: 7642; WAN024FFQ; Start 168; Stop 192
cctatttgctattttgccgattctt

SEQ ID NO: 473562 - DNA, 25 bp, Artificial
  probe
  misc_feature (1)..(25): SEQ ID NO: 7642; WAN024FFQ; Start 170; Stop 194
tatttgctattttgccgattcttgg

SEQ ID NO: 473563 - DNA, 25 bp, Artificial
  probe
  misc_feature (1)..(25): SEQ ID NO: 7643; WAN024BWB; Start 50; Stop 74
agtgtatcggcttatatatgttggt

SEQ ID NO: 473564 - DNA, 25 bp, Artificial
  probe
  misc_feature (1)..(25): SEQ ID NO: 7643; WAN024BWB; Start 49; Stop 73
cagtgtatcggcttatatatgttgg

SEQ ID NO: 473565 - DNA, 25 bp, Artificial
  probe
  misc_feature (1)..(25): SEQ ID NO: 7643; WAN024BWB; Start 48; Stop 72
tcagtgtatcggcttatatatgttg

SEQ ID NO: 473566 - DNA, 25 bp, Artificial
  probe
  misc_feature (1)..(25): SEQ ID NO: 7643; WAN024BWB; Start 56; Stop 80
tcggcttatatatgttggtacactt

SEQ ID NO: 473567 - DNA, 25 bp, Artificial
  probe
  misc_feature (1)..(25): SEQ ID NO: 7643; WAN024BWB; Start 55; Stop 79
atcggcttatatatgttggtacact

SEQ ID NO: 473568 - DNA, 25 bp, Artificial
  probe
  misc_feature (1)..(25): SEQ ID NO: 7643; WAN024BWB; Start 51; Stop 75
gtgtatcggcttatatatgttggta

SEQ ID NO: 473569 - DNA, 25 bp, Artificial
  probe
  misc_feature (1)..(25): SEQ ID NO: 7643; WAN024BWB; Start 52; Stop 76
tgtatcggcttatatatgttggtac

SEQ ID NO: 473570 - DNA, 25 bp, Artificial
  probe
  misc_feature (1)..(25): SEQ ID NO: 7643; WAN024BWB; Start 47; Stop 71
atcagtgtatcggcttatatatgtt

SEQ ID NO: 473571 - DNA, 25 bp, Artificial
  probe
  misc_feature (1)..(25): SEQ ID NO: 7643; WAN024BWB; Start 46; Stop 70
aatcagtgtatcggcttatatatgt

SEQ ID NO: 473572 - DNA, 25 bp, Artificial
  probe
  misc_feature (1)..(25): SEQ ID NO: 7643; WAN024BWB; Start 54; Stop 78
tatcggcttatatatgttggtacac

SEQ ID NO: 473573 - DNA, 25 bp, Artificial
  probe
  misc_feature (1)..(25): SEQ ID NO: 7643; WAN024BWB; Start 53; Stop 77
gtatcggcttatatatgttggtaca

SEQ ID NO: 473574 - DNA, 25 bp, Artificial
  probe
  misc_feature (1)..(25): SEQ ID NO: 7643; WAN024BWB; Start 57; Stop 81
cggcttatatatgttggtacacttt

SEQ ID NO: 473575 - DNA, 25 bp, Artificial
  probe
  misc_feature (1)..(25): SEQ ID NO: 7643; WAN024BWB; Start 128; Stop 152
ctgctgctgacttgtctaatatcgc

SEQ ID NO: 473576 - DNA, 25 bp, Artificial
  probe
  misc_feature (1)..(25): SEQ ID NO: 7643; WAN024BWB; Start 127; Stop 151
gctgctgctgacttgtctaatatcg

SEQ ID NO: 473577 - DNA, 25 bp, Artificial
  probe
  misc_feature (1)..(25): SEQ ID NO: 7643; WAN024BWB; Start 125; Stop 149
tagctgctgctgacttgtctaatat

SEQ ID NO: 473578 - DNA, 25 bp, Artificial
  probe
  misc_feature (1)..(25): SEQ ID NO: 7643; WAN024BWB; Start 6; Stop 30
taacctgctatcagttaagggcttt

SEQ ID NO: 473579 - DNA, 25 bp, Artificial
  probe
  misc_feature (1)..(25): SEQ ID NO: 7643; WAN024BWB; Start 1; Stop 25
ttgggtaacctgctatcagttaagg

SEQ ID NO: 473580 - DNA, 25 bp, Artificial
  probe
  misc_feature (1)..(25): SEQ ID NO: 7643; WAN024BWB; Start 124; Stop 148
ctagctgctgctgacttgtctaata

SEQ ID NO: 473581 - DNA, 25 bp, Artificial
  probe
  misc_feature (1)..(25): SEQ ID NO: 7643; WAN024BWB; Start 5; Stop 29
gtaacctgctatcagttaagggctt

SEQ ID NO: 473582 - DNA, 25 bp, Artificial
  probe
  misc_feature (1)..(25): SEQ ID NO: 7643; WAN024BWB; Start 126; Stop 150
agctgctgctgacttgtctaatatc

SEQ ID NO: 473583 - DNA, 25 bp, Artificial
  probe
  misc_feature (1)..(25): SEQ ID NO: 7643; WAN024BWB; Start 45; Stop 69
aaatcagtgtatcggcttatatatg

SEQ ID NO: 473584 - DNA, 25 bp, Artificial
  probe
  misc_feature (1)..(25): SEQ ID NO: 7643; WAN024BWB; Start 11; Stop 35
tgctatcagttaagggcttttatat

SEQ ID NO: 473585 - DNA, 25 bp, Artificial
  probe
  misc_feature (1)..(25): SEQ ID NO: 7643; WAN024BWB; Start 9; Stop 33
cctgctatcagttaagggcttttat

SEQ ID NO: 473586 - DNA, 25 bp, Artificial
  probe
  misc_feature (1)..(25): SEQ ID NO: 7643; WAN024BWB; Start 129; Stop 153
tgctgctgacttgtctaatatcgcc

SEQ ID NO: 473587 - DNA, 25 bp, Artificial
  probe
  misc_feature (1)..(25): SEQ ID NO: 7643; WAN024BWB; Start 10; Stop 34
ctgctatcagttaagggcttttata

SEQ ID NO: 473588 - DNA, 25 bp, Artificial
  probe
  misc_feature (1)..(25): SEQ ID NO: 7643; WAN024BWB; Start 2; Stop 26
tgggtaacctgctatcagttaaggg

SEQ ID NO: 473589 - DNA, 25 bp, Artificial
  probe
  misc_feature (1)..(25): SEQ ID NO: 7643; WAN024BWB; Start 8; Stop 32
acctgctatcagttaagggctttta

SEQ ID NO: 473590 - DNA, 25 bp, Artificial
  probe
  misc_feature (1)..(25): SEQ ID NO: 7643; WAN024BWB; Start 4; Stop 28
ggtaacctgctatcagttaagggct

SEQ ID NO: 473591 - DNA, 25 bp, Artificial
  probe
  misc_feature (1)..(25): SEQ ID NO: 7643; WAN024BWB; Start 12; Stop 36
gctatcagttaagggcttttatatt

SEQ ID NO: 473592 - DNA, 25 bp, Artificial
  probe
  misc_feature (1)..(25): SEQ ID NO: 7643; WAN024BWB; Start 7; Stop 31
aacctgctatcagttaagggctttt

SEQ ID NO: 473593 - DNA, 25 bp, Artificial
  probe
  misc_feature (1)..(25): SEQ ID NO: 7643; WAN024BWB; Start 58; Stop 82
ggcttatatatgttggtacactttt

SEQ ID NO: 473594 - DNA, 25 bp, Artificial
  probe
  misc_feature (1)..(25): SEQ ID NO: 7643; WAN024BWB; Start 3; Stop 27
gggtaacctgctatcagttaagggc

SEQ ID NO: 473595 - DNA, 25 bp, Artificial
  probe
  misc_feature (1)..(25): SEQ ID NO: 7643; WAN024BWB; Start 44; Stop 68
aaaatcagtgtatcggcttatatat

SEQ ID NO: 473596 - DNA, 25 bp, Artificial
  probe
  misc_feature (1)..(25): SEQ ID NO: 7644; WAN024GGM; Start 184; Stop 208
acctgtctcaagaataatcaactca

SEQ ID NO: 473597 - DNA, 25 bp, Artificial
  probe
  misc_feature (1)..(25): SEQ ID NO: 7644; WAN024GGM; Start 177; Stop 201
ccatacgacctgtctcaagaataat

SEQ ID NO: 473598 - DNA, 25 bp, Artificial
  probe
  misc_feature (1)..(25): SEQ ID NO: 7644; WAN024GGM; Start 150; Stop 174
tcttacgaagtccattgataggttc

SEQ ID NO: 473599 - DNA, 25 bp, Artificial
  probe
  misc_feature (1)..(25): SEQ ID NO: 7644; WAN024GGM; Start 148; Stop 172
catcttacgaagtccattgataggt

SEQ ID NO: 473600 - DNA, 25 bp, Artificial
  probe
  misc_feature (1)..(25): SEQ ID NO: 7644; WAN024GGM; Start 147; Stop 171
acatcttacgaagtccattgatagg

SEQ ID NO: 473601 - DNA, 25 bp, Artificial
  probe
  misc_feature (1)..(25): SEQ ID NO: 7644; WAN024GGM; Start 180; Stop 204
tacgacctgtctcaagaataatcaa

SEQ ID NO: 473602 - DNA, 25 bp, Artificial
  probe
  misc_feature (1)..(25): SEQ ID NO: 7644; WAN024GGM; Start 149; Stop 173
atcttacgaagtccattgataggtt

SEQ ID NO: 473603 - DNA, 25 bp, Artificial
  probe
  misc_feature (1)..(25): SEQ ID NO: 7644; WAN024GGM; Start 182; Stop 206
cgacctgtctcaagaataatcaact

SEQ ID NO: 473604 - DNA, 25 bp, Artificial
  probe
  misc_feature (1)..(25): SEQ ID NO: 7644; WAN024GGM; Start 179; Stop 203
atacgacctgtctcaagaataatca

SEQ ID NO: 473605 - DNA, 25 bp, Artificial
  probe
  misc_feature (1)..(25): SEQ ID NO: 7644; WAN024GGM; Start 183; Stop 207
gacctgtctcaagaataatcaactc

SEQ ID NO: 473606 - DNA, 25 bp, Artificial
  probe
  misc_feature (1)..(25): SEQ ID NO: 7644; WAN024GGM; Start 181; Stop 205
acgacctgtctcaagaataatcaac

SEQ ID NO: 473607 - DNA, 25 bp, Artificial
  probe
  misc_feature (1)..(25): SEQ ID NO: 7644; WAN024GGM; Start 178; Stop 202
catacgacctgtctcaagaataatc

SEQ ID NO: 473608 - DNA, 25 bp, Artificial
  probe
  misc_feature (1)..(25): SEQ ID NO: 7644; WAN024GGM; Start 185; Stop 209
cctgtctcaagaataatcaactcat

SEQ ID NO: 473609 - DNA, 25 bp, Artificial
  probe
  misc_feature (1)..(25): SEQ ID NO: 7644; WAN024GGM; Start 151; Stop 175
cttacgaagtccattgataggttca

SEQ ID NO: 473610 - DNA, 25 bp, Artificial
  probe
  misc_feature (1)..(25): SEQ ID NO: 7644; WAN024GGM; Start 152; Stop 176
ttacgaagtccattgataggttcac

SEQ ID NO: 473611 - DNA, 25 bp, Artificial
  probe
  misc_feature (1)..(25): SEQ ID NO: 7644; WAN024GGM; Start 145; Stop 169
cgacatcttacgaagtccattgata

SEQ ID NO: 473612 - DNA, 25 bp, Artificial
  probe
  misc_feature (1)..(25): SEQ ID NO: 7644; WAN024GGM; Start 188; Stop 212
gtctcaagaataatcaactcatggt

SEQ ID NO: 473613 - DNA, 25 bp, Artificial
  probe
  misc_feature (1)..(25): SEQ ID NO: 7644; WAN024GGM; Start 187; Stop 211
tgtctcaagaataatcaactcatgg

SEQ ID NO: 473614 - DNA, 25 bp, Artificial
  probe
  misc_feature (1)..(25): SEQ ID NO: 7644; WAN024GGM; Start 146; Stop 170
gacatcttacgaagtccattgatag

SEQ ID NO: 473615 - DNA, 25 bp, Artificial
  probe
  misc_feature (1)..(25): SEQ ID NO: 7644; WAN024GGM; Start 189; Stop 213
tctcaagaataatcaactcatggtc

SEQ ID NO: 473616 - DNA, 25 bp, Artificial
  probe
  misc_feature (1)..(25): SEQ ID NO: 7644; WAN024GGM; Start 190; Stop 214
ctcaagaataatcaactcatggtct

SEQ ID NO: 473617 - DNA, 25 bp, Artificial
  probe
  misc_feature (1)..(25): SEQ ID NO: 7644; WAN024GGM; Start 153; Stop 177
tacgaagtccattgataggttcacc

SEQ ID NO: 473618 - DNA, 25 bp, Artificial
  probe
  misc_feature (1)..(25): SEQ ID NO: 7644; WAN024GGM; Start 194; Stop 218
agaataatcaactcatggtcttcaa

SEQ ID NO: 473619 - DNA, 25 bp, Artificial
  probe
  misc_feature (1)..(25): SEQ ID NO: 7644; WAN024GGM; Start 186; Stop 210
ctgtctcaagaataatcaactcatg

SEQ ID NO: 473620 - DNA, 25 bp, Artificial
  probe
  misc_feature (1)..(25): SEQ ID NO: 7644; WAN024GGM; Start 109; Stop 133
cccatccttgatttctacataacga

SEQ ID NO: 473621 - DNA, 25 bp, Artificial
  probe
  misc_feature (1)..(25): SEQ ID NO: 7644; WAN024GGM; Start 220; Stop 244
gcgagacatatctttaggcttaatc

SEQ ID NO: 473622 - DNA, 25 bp, Artificial
  probe
  misc_feature (1)..(25): SEQ ID NO: 7644; WAN024GGM; Start 113; Stop 137
tccttgatttctacataacgatggc

SEQ ID NO: 473623 - DNA, 25 bp, Artificial
  probe
  misc_feature (1)..(25): SEQ ID NO: 7644; WAN024GGM; Start 110; Stop 134
ccatccttgatttctacataacgat

SEQ ID NO: 473624 - DNA, 25 bp, Artificial
  probe
  misc_feature (1)..(25): SEQ ID NO: 7644; WAN024GGM; Start 238; Stop 262
cttaatcaagagaatttcgttggct

SEQ ID NO: 473625 - DNA, 25 bp, Artificial
  probe
  misc_feature (1)..(25): SEQ ID NO: 7644; WAN024GGM; Start 235; Stop 259
aggcttaatcaagagaatttcgttg

SEQ ID NO: 473626 - DNA, 25 bp, Artificial
  probe
  misc_feature (1)..(25): SEQ ID NO: 7644; WAN024GGM; Start 236; Stop 260
ggcttaatcaagagaatttcgttgg

SEQ ID NO: 473627 - DNA, 25 bp, Artificial
  probe
  misc_feature (1)..(25): SEQ ID NO: 7644; WAN024GGM; Start 115; Stop 139
cttgatttctacataacgatggcga

SEQ ID NO: 473628 - DNA, 25 bp, Artificial
  probe
  misc_feature (1)..(25): SEQ ID NO: 7644; WAN024GGM; Start 112; Stop 136
atccttgatttctacataacgatgg

SEQ ID NO: 473629 - DNA, 25 bp, Artificial
  probe
  misc_feature (1)..(25): SEQ ID NO: 7645; WAN024BS7; Start 24; Stop 48
aagaacaaggttgggaacatcattt

SEQ ID NO: 473630 - DNA, 25 bp, Artificial
  probe
  misc_feature (1)..(25): SEQ ID NO: 7645; WAN024BS7; Start 28; Stop 52
acaaggttgggaacatcatttgaaa

SEQ ID NO: 473631 - DNA, 25 bp, Artificial
  probe
  misc_feature (1)..(25): SEQ ID NO: 7645; WAN024BS7; Start 27; Stop 51
aacaaggttgggaacatcatttgaa

SEQ ID NO: 473632 - DNA, 25 bp, Artificial
  probe
  misc_feature (1)..(25): SEQ ID NO: 7645; WAN024BS7; Start 23; Stop 47
gaagaacaaggttgggaacatcatt

SEQ ID NO: 473633 - DNA, 25 bp, Artificial
  probe
  misc_feature (1)..(25): SEQ ID NO: 7645; WAN024BS7; Start 25; Stop 49
agaacaaggttgggaacatcatttg

SEQ ID NO: 473634 - DNA, 25 bp, Artificial
  probe
  misc_feature (1)..(25): SEQ ID NO: 7645; WAN024BS7; Start 26; Stop 50
gaacaaggttgggaacatcatttga

SEQ ID NO: 473635 - DNA, 25 bp, Artificial
  probe
  misc_feature (1)..(25): SEQ ID NO: 7645; WAN024BS7; Start 46; Stop 70
tttgaaaatggctatggaactggaa

SEQ ID NO: 473636 - DNA, 25 bp, Artificial
  probe
  misc_feature (1)..(25): SEQ ID NO: 7645; WAN024BS7; Start 45; Stop 69
atttgaaaatggctatggaactgga

SEQ ID NO: 473637 - DNA, 25 bp, Artificial
  probe
  misc_feature (1)..(25): SEQ ID NO: 7645; WAN024BS7; Start 30; Stop 54
aaggttgggaacatcatttgaaaat

SEQ ID NO: 473638 - DNA, 25 bp, Artificial
  probe
  misc_feature (1)..(25): SEQ ID NO: 7645; WAN024BS7; Start 29; Stop 53
caaggttgggaacatcatttgaaaa

SEQ ID NO: 473639 - DNA, 25 bp, Artificial
  probe
  misc_feature (1)..(25): SEQ ID NO: 7645; WAN024BS7; Start 22; Stop 46
cgaagaacaaggttgggaacatcat

SEQ ID NO: 473640 - DNA, 25 bp, Artificial
  probe
  misc_feature (1)..(25): SEQ ID NO: 7645; WAN024BS7; Start 47; Stop 71
ttgaaaatggctatggaactggaac

SEQ ID NO: 473641 - DNA, 25 bp, Artificial
  probe
  misc_feature (1)..(25): SEQ ID NO: 7645; WAN024BS7; Start 5; Stop 29
gtattggtgtagaaaaccgaagaac

SEQ ID NO: 473642 - DNA, 25 bp, Artificial
  probe
  misc_feature (1)..(25): SEQ ID NO: 7645; WAN024BS7; Start 6; Stop 30
tattggtgtagaaaaccgaagaaca

SEQ ID NO: 473643 - DNA, 25 bp, Artificial
  probe
  misc_feature (1)..(25): SEQ ID NO: 7645; WAN024BS7; Start 4; Stop 28
ggtattggtgtagaaaaccgaagaa

SEQ ID NO: 473644 - DNA, 25 bp, Artificial
  probe
  misc_feature (1)..(25): SEQ ID NO: 7645; WAN024BS7; Start 7; Stop 31
attggtgtagaaaaccgaagaacaa

SEQ ID NO: 473645 - DNA, 25 bp, Artificial
  probe
  misc_feature (1)..(25): SEQ ID NO: 7645; WAN024BS7; Start 8; Stop 32
ttggtgtagaaaaccgaagaacaag

SEQ ID NO: 473646 - DNA, 25 bp, Artificial
  probe
  misc_feature (1)..(25): SEQ ID NO: 7645; WAN024BS7; Start 1; Stop 25
ttgggtattggtgtagaaaaccgaa

SEQ ID NO: 473647 - DNA, 25 bp, Artificial
  probe
  misc_feature (1)..(25): SEQ ID NO: 7645; WAN024BS7; Start 43; Stop 67
tcatttgaaaatggctatggaactg

SEQ ID NO: 473648 - DNA, 25 bp, Artificial
  probe
  misc_feature (1)..(25): SEQ ID NO: 7645; WAN024BS7; Start 36; Stop 60
gggaacatcatttgaaaatggctat

SEQ ID NO: 473649 - DNA, 25 bp, Artificial
  probe
  misc_feature (1)..(25): SEQ ID NO: 7645; WAN024BS7; Start 48; Stop 72
tgaaaatggctatggaactggaacg

SEQ ID NO: 473650 - DNA, 25 bp, Artificial
  probe
  misc_feature (1)..(25): SEQ ID NO: 7645; WAN024BS7; Start 31; Stop 55
aggttgggaacatcatttgaaaatg

SEQ ID NO: 473651 - DNA, 25 bp, Artificial
  probe
  misc_feature (1)..(25): SEQ ID NO: 7645; WAN024BS7; Start 40; Stop 64
acatcatttgaaaatggctatggaa

SEQ ID NO: 473652 - DNA, 25 bp, Artificial
  probe
  misc_feature (1)..(25): SEQ ID NO: 7645; WAN024BS7; Start 39; Stop 63
aacatcatttgaaaatggctatgga

SEQ ID NO: 473653 - DNA, 25 bp, Artificial
  probe
  misc_feature (1)..(25): SEQ ID NO: 7645; WAN024BS7; Start 41; Stop 65
catcatttgaaaatggctatggaac

SEQ ID NO: 473654 - DNA, 25 bp, Artificial
  probe
  misc_feature (1)..(25): SEQ ID NO: 7645; WAN024BS7; Start 38; Stop 62
gaacatcatttgaaaatggctatgg

SEQ ID NO: 473655 - DNA, 25 bp, Artificial
  probe
  misc_feature (1)..(25): SEQ ID NO: 7645; WAN024BS7; Start 37; Stop 61
ggaacatcatttgaaaatggctatg

SEQ ID NO: 473656 - DNA, 25 bp, Artificial
  probe
  misc_feature (1)..(25): SEQ ID NO: 7645; WAN024BS7; Start 42; Stop 66
atcatttgaaaatggctatggaact

SEQ ID NO: 473657 - DNA, 25 bp, Artificial
  probe
  misc_feature (1)..(25): SEQ ID NO: 7645; WAN024BS7; Start 44; Stop 68
catttgaaaatggctatggaactgg

SEQ ID NO: 473658 - DNA, 25 bp, Artificial
  probe
  misc_feature (1)..(25): SEQ ID NO: 7645; WAN024BS7; Start 3; Stop 27
gggtattggtgtagaaaaccgaaga

SEQ ID NO: 473659 - DNA, 25 bp, Artificial
  probe
  misc_feature (1)..(25): SEQ ID NO: 7645; WAN024BS7; Start 35; Stop 59
tgggaacatcatttgaaaatggcta

SEQ ID NO: 473660 - DNA, 25 bp, Artificial
  probe
  misc_feature (1)..(25): SEQ ID NO: 7645; WAN024BS7; Start 32; Stop 56
ggttgggaacatcatttgaaaatgg

SEQ ID NO: 473661 - DNA, 25 bp, Artificial
  probe
  misc_feature (1)..(25): SEQ ID NO: 7645; WAN024BS7; Start 2; Stop 26
tgggtattggtgtagaaaaccgaag

SEQ ID NO: 473662 - DNA, 25 bp, Artificial
  probe
  misc_feature (1)..(25): SEQ ID NO: 7646; WAN024ES6; Start 88; Stop 112
ggattatctgaactcgtcacaacag

SEQ ID NO: 473663 - DNA, 25 bp, Artificial
  probe
  misc_feature (1)..(25): SEQ ID NO: 7646; WAN024ES6; Start 89; Stop 113
gattatctgaactcgtcacaacagc

SEQ ID NO: 473664 - DNA, 25 bp, Artificial
  probe
  misc_feature (1)..(25): SEQ ID NO: 7646; WAN024ES6; Start 173; Stop 197
taggcatgatttactcactctttct

SEQ ID NO: 473665 - DNA, 25 bp, Artificial
  probe
  misc_feature (1)..(25): SEQ ID NO: 7646; WAN024ES6; Start 170; Stop 194
tcttaggcatgatttactcactctt

SEQ ID NO: 473666 - DNA, 25 bp, Artificial
  probe
  misc_feature (1)..(25): SEQ ID NO: 7646; WAN024ES6; Start 169; Stop 193
ttcttaggcatgatttactcactct

SEQ ID NO: 473667 - DNA, 25 bp, Artificial
  probe
  misc_feature (1)..(25): SEQ ID NO: 7646; WAN024ES6; Start 85; Stop 109
atgggattatctgaactcgtcacaa

SEQ ID NO: 473668 - DNA, 25 bp, Artificial
  probe
  misc_feature (1)..(25): SEQ ID NO: 7646; WAN024ES6; Start 176; Stop 200
gcatgatttactcactctttctgaa

SEQ ID NO: 473669 - DNA, 25 bp, Artificial
  probe
  misc_feature (1)..(25): SEQ ID NO: 7646; WAN024ES6; Start 185; Stop 209
actcactctttctgaaatgtggtat

SEQ ID NO: 473670 - DNA, 25 bp, Artificial
  probe
  misc_feature (1)..(25): SEQ ID NO: 7646; WAN024ES6; Start 183; Stop 207
ttactcactctttctgaaatgtggt

SEQ ID NO: 473671 - DNA, 25 bp, Artificial
  probe
  misc_feature (1)..(25): SEQ ID NO: 7646; WAN024ES6; Start 175; Stop 199
ggcatgatttactcactctttctga

SEQ ID NO: 473672 - DNA, 25 bp, Artificial
  probe
  misc_feature (1)..(25): SEQ ID NO: 7646; WAN024ES6; Start 174; Stop 198
aggcatgatttactcactctttctg

SEQ ID NO: 473673 - DNA, 25 bp, Artificial
  probe
  misc_feature (1)..(25): SEQ ID NO: 7646; WAN024ES6; Start 184; Stop 208
tactcactctttctgaaatgtggta

SEQ ID NO: 473674 - DNA, 25 bp, Artificial
  probe
  misc_feature (1)..(25): SEQ ID NO: 7646; WAN024ES6; Start 172; Stop 196
ttaggcatgatttactcactctttc

SEQ ID NO: 473675 - DNA, 25 bp, Artificial
  probe
  misc_feature (1)..(25): SEQ ID NO: 7646; WAN024ES6; Start 168; Stop 192
tttcttaggcatgatttactcactc

SEQ ID NO: 473676 - DNA, 25 bp, Artificial
  probe
  misc_feature (1)..(25): SEQ ID NO: 7646; WAN024ES6; Start 182; Stop 206
tttactcactctttctgaaatgtgg

SEQ ID NO: 473677 - DNA, 25 bp, Artificial
  probe
  misc_feature (1)..(25): SEQ ID NO: 7646; WAN024ES6; Start 171; Stop 195
cttaggcatgatttactcactcttt

SEQ ID NO: 473678 - DNA, 25 bp, Artificial
  probe
  misc_feature (1)..(25): SEQ ID NO: 7646; WAN024ES6; Start 90; Stop 114
attatctgaactcgtcacaacagcg

SEQ ID NO: 473679 - DNA, 25 bp, Artificial
  probe
  misc_feature (1)..(25): SEQ ID NO: 7646; WAN024ES6; Start 87; Stop 111
gggattatctgaactcgtcacaaca

SEQ ID NO: 473680 - DNA, 25 bp, Artificial
  probe
  misc_feature (1)..(25): SEQ ID NO: 7646; WAN024ES6; Start 86; Stop 110
tgggattatctgaactcgtcacaac

SEQ ID NO: 473681 - DNA, 25 bp, Artificial
  probe
  misc_feature (1)..(25): SEQ ID NO: 7646; WAN024ES6; Start 186; Stop 210
ctcactctttctgaaatgtggtata

SEQ ID NO: 473682 - DNA, 25 bp, Artificial
  probe
  misc_feature (1)..(25): SEQ ID NO: 7646; WAN024ES6; Start 83; Stop 107
tcatgggattatctgaactcgtcac

SEQ ID NO: 473683 - DNA, 25 bp, Artificial
  probe
  misc_feature (1)..(25): SEQ ID NO: 7646; WAN024ES6; Start 187; Stop 211
tcactctttctgaaatgtggtataa

SEQ ID NO: 473684 - DNA, 25 bp, Artificial
  probe
  misc_feature (1)..(25): SEQ ID NO: 7646; WAN024ES6; Start 84; Stop 108
catgggattatctgaactcgtcaca

SEQ ID NO: 473685 - DNA, 25 bp, Artificial
  probe
  misc_feature (1)..(25): SEQ ID NO: 7646; WAN024ES6; Start 189; Stop 213
actctttctgaaatgtggtataatc

SEQ ID NO: 473686 - DNA, 25 bp, Artificial
  probe
  misc_feature (1)..(25): SEQ ID NO: 7646; WAN024ES6; Start 9; Stop 33
gatatggggacttggaaggttaaaa

SEQ ID NO: 473687 - DNA, 25 bp, Artificial
  probe
  misc_feature (1)..(25): SEQ ID NO: 7646; WAN024ES6; Start 181; Stop 205
atttactcactctttctgaaatgtg

SEQ ID NO: 473688 - DNA, 25 bp, Artificial
  probe
  misc_feature (1)..(25): SEQ ID NO: 7646; WAN024ES6; Start 180; Stop 204
gatttactcactctttctgaaatgt

SEQ ID NO: 473689 - DNA, 25 bp, Artificial
  probe
  misc_feature (1)..(25): SEQ ID NO: 7646; WAN024ES6; Start 179; Stop 203
tgatttactcactctttctgaaatg

SEQ ID NO: 473690 - DNA, 25 bp, Artificial
  probe
  misc_feature (1)..(25): SEQ ID NO: 7646; WAN024ES6; Start 177; Stop 201
catgatttactcactctttctgaaa

SEQ ID NO: 473691 - DNA, 25 bp, Artificial
  probe
  misc_feature (1)..(25): SEQ ID NO: 7646; WAN024ES6; Start 136; Stop 160
gaaatagttccacccgtatgtaaaa

SEQ ID NO: 473692 - DNA, 25 bp, Artificial
  probe
  misc_feature (1)..(25): SEQ ID NO: 7646; WAN024ES6; Start 137; Stop 161
aaatagttccacccgtatgtaaaac

SEQ ID NO: 473693 - DNA, 25 bp, Artificial
  probe
  misc_feature (1)..(25): SEQ ID NO: 7646; WAN024ES6; Start 6; Stop 30
tttgatatggggacttggaaggtta

SEQ ID NO: 473694 - DNA, 25 bp, Artificial
  probe
  misc_feature (1)..(25): SEQ ID NO: 7646; WAN024ES6; Start 8; Stop 32
tgatatggggacttggaaggttaaa

SEQ ID NO: 473695 - DNA, 25 bp, Artificial
  probe
  misc_feature (1)..(25): SEQ ID NO: 7647; WAN024B8I; Start 54; Stop 78
tgttggatgttgggcactaactaat

SEQ ID NO: 473696 - DNA, 25 bp, Artificial
  probe
  misc_feature (1)..(25): SEQ ID NO: 7647; WAN024B8I; Start 53; Stop 77
ttgttggatgttgggcactaactaa

SEQ ID NO: 473697 - DNA, 25 bp, Artificial
  probe
  misc_feature (1)..(25): SEQ ID NO: 7647; WAN024B8I; Start 52; Stop 76
cttgttggatgttgggcactaacta

SEQ ID NO: 473698 - DNA, 25 bp, Artificial
  probe
  misc_feature (1)..(25): SEQ ID NO: 7647; WAN024B8I; Start 19; Stop 43
ctagaagcttatcgtcaactggaag

SEQ ID NO: 473699 - DNA, 25 bp, Artificial
  probe
  misc_feature (1)..(25): SEQ ID NO: 7647; WAN024B8I; Start 20; Stop 44
tagaagcttatcgtcaactggaaga

SEQ ID NO: 473700 - DNA, 25 bp, Artificial
  probe
  misc_feature (1)..(25): SEQ ID NO: 7647; WAN024B8I; Start 22; Stop 46
gaagcttatcgtcaactggaagaag

SEQ ID NO: 473701 - DNA, 25 bp, Artificial
  probe
  misc_feature (1)..(25): SEQ ID NO: 7647; WAN024B8I; Start 49; Stop 73
gaacttgttggatgttgggcactaa

SEQ ID NO: 473702 - DNA, 25 bp, Artificial
  probe
  misc_feature (1)..(25): SEQ ID NO: 7647; WAN024B8I; Start 21; Stop 45
agaagcttatcgtcaactggaagaa

SEQ ID NO: 473703 - DNA, 25 bp, Artificial
  probe
  misc_feature (1)..(25): SEQ ID NO: 7647; WAN024B8I; Start 50; Stop 74
aacttgttggatgttgggcactaac

SEQ ID NO: 473704 - DNA, 25 bp, Artificial
  probe
  misc_feature (1)..(25): SEQ ID NO: 7647; WAN024B8I; Start 51; Stop 75
acttgttggatgttgggcactaact

SEQ ID NO: 473705 - DNA, 25 bp, Artificial
  probe
  misc_feature (1)..(25): SEQ ID NO: 7647; WAN024B8I; Start 48; Stop 72
tgaacttgttggatgttgggcacta

SEQ ID NO: 473706 - DNA, 25 bp, Artificial
  probe
  misc_feature (1)..(25): SEQ ID NO: 7647; WAN024B8I; Start 18; Stop 42
gctagaagcttatcgtcaactggaa

SEQ ID NO: 473707 - DNA, 25 bp, Artificial
  probe
  misc_feature (1)..(25): SEQ ID NO: 7647; WAN024B8I; Start 13; Stop 37
gaaccgctagaagcttatcgtcaac

SEQ ID NO: 473708 - DNA, 25 bp, Artificial
  probe
  misc_feature (1)..(25): SEQ ID NO: 7647; WAN024B8I; Start 14; Stop 38
aaccgctagaagcttatcgtcaact

SEQ ID NO: 473709 - DNA, 25 bp, Artificial
  probe
  misc_feature (1)..(25): SEQ ID NO: 7647; WAN024B8I; Start 17; Stop 41
cgctagaagcttatcgtcaactgga

SEQ ID NO: 473710 - DNA, 25 bp, Artificial
  probe
  misc_feature (1)..(25): SEQ ID NO: 7647; WAN024B8I; Start 15; Stop 39
accgctagaagcttatcgtcaactg

SEQ ID NO: 473711 - DNA, 25 bp, Artificial
  probe
  misc_feature (1)..(25): SEQ ID NO: 7647; WAN024B8I; Start 12; Stop 36
cgaaccgctagaagcttatcgtcaa

SEQ ID NO: 473712 - DNA, 25 bp, Artificial
  probe
  misc_feature (1)..(25): SEQ ID NO: 7647; WAN024B8I; Start 23; Stop 47
aagcttatcgtcaactggaagaagc

SEQ ID NO: 473713 - DNA, 25 bp, Artificial
  probe
  misc_feature (1)..(25): SEQ ID NO: 7647; WAN024B8I; Start 5; Stop 29
taaactgcgaaccgctagaagctta

SEQ ID NO: 473714 - DNA, 25 bp, Artificial
  probe
  misc_feature (1)..(25): SEQ ID NO: 7647; WAN024B8I; Start 6; Stop 30
aaactgcgaaccgctagaagcttat

SEQ ID NO: 473715 - DNA, 25 bp, Artificial
  probe
  misc_feature (1)..(25): SEQ ID NO: 7648; WAN024DHJ; Start 2; Stop 26
tggtaagtcagtatgttgcgaataa

SEQ ID NO: 473716 - DNA, 25 bp, Artificial
  probe
  misc_feature (1)..(25): SEQ ID NO: 7648; WAN024DHJ; Start 1; Stop 25
ttggtaagtcagtatgttgcgaata

SEQ ID NO: 473717 - DNA, 25 bp, Artificial
  probe
  misc_feature (1)..(25): SEQ ID NO: 7648; WAN024DHJ; Start 3; Stop 27
ggtaagtcagtatgttgcgaataat

SEQ ID NO: 473718 - DNA, 25 bp, Artificial
  probe
  misc_feature (1)..(25): SEQ ID NO: 7648; WAN024DHJ; Start 4; Stop 28
gtaagtcagtatgttgcgaataatt

SEQ ID NO: 473719 - DNA, 25 bp, Artificial
  probe
  misc_feature (1)..(25): SEQ ID NO: 7648; WAN024DHJ; Start 9; Stop 33
tcagtatgttgcgaataatttctca

SEQ ID NO: 473720 - DNA, 25 bp, Artificial
  probe
  misc_feature (1)..(25): SEQ ID NO: 7648; WAN024DHJ; Start 7; Stop 31
agtcagtatgttgcgaataatttct

SEQ ID NO: 473721 - DNA, 25 bp, Artificial
  probe
  misc_feature (1)..(25): SEQ ID NO: 7648; WAN024DHJ; Start 8; Stop 32
gtcagtatgttgcgaataatttctc

SEQ ID NO: 473722 - DNA, 25 bp, Artificial
  probe
  misc_feature (1)..(25): SEQ ID NO: 7648; WAN024DHJ; Start 6; Stop 30
aagtcagtatgttgcgaataatttc

SEQ ID NO: 473723 - DNA, 25 bp, Artificial
  probe
  misc_feature (1)..(25): SEQ ID NO: 7648; WAN024DHJ; Start 10; Stop 34
cagtatgttgcgaataatttctcaa

SEQ ID NO: 473724 - DNA, 25 bp, Artificial
  probe
  misc_feature (1)..(25): SEQ ID NO: 7648; WAN024DHJ; Start 94; Stop 118
tacaatcaaactcctcactatcttt

SEQ ID NO: 473725 - DNA, 25 bp, Artificial
  probe
  misc_feature (1)..(25): SEQ ID NO: 7648; WAN024DHJ; Start 93; Stop 117
atacaatcaaactcctcactatctt

SEQ ID NO: 473726 - DNA, 25 bp, Artificial
  probe
  misc_feature (1)..(25): SEQ ID NO: 7648; WAN024DHJ; Start 11; Stop 35
agtatgttgcgaataatttctcaaa

SEQ ID NO: 473727 - DNA, 25 bp, Artificial
  probe
  misc_feature (1)..(25): SEQ ID NO: 7648; WAN024DHJ; Start 13; Stop 37
tatgttgcgaataatttctcaaaga

SEQ ID NO: 473728 - DNA, 25 bp, Artificial
  probe
  misc_feature (1)..(25): SEQ ID NO: 7648; WAN024DHJ; Start 12; Stop 36
gtatgttgcgaataatttctcaaag

SEQ ID NO: 473729 - DNA, 25 bp, Artificial
  probe
  misc_feature (1)..(25): SEQ ID NO: 7648; WAN024DHJ; Start 5; Stop 29
taagtcagtatgttgcgaataattt

SEQ ID NO: 473730 - DNA, 25 bp, Artificial
  probe
  misc_feature (1)..(25): SEQ ID NO: 7648; WAN024DHJ; Start 19; Stop 43
gcgaataatttctcaaagaatggca

SEQ ID NO: 473731 - DNA, 25 bp, Artificial
  probe
  misc_feature (1)..(25): SEQ ID NO: 7648; WAN024DHJ; Start 18; Stop 42
tgcgaataatttctcaaagaatggc

SEQ ID NO: 473732 - DNA, 25 bp, Artificial
  probe
  misc_feature (1)..(25): SEQ ID NO: 7648; WAN024DHJ; Start 92; Stop 116
tatacaatcaaactcctcactatct

SEQ ID NO: 473733 - DNA, 25 bp, Artificial
  probe
  misc_feature (1)..(25): SEQ ID NO: 7648; WAN024DHJ; Start 99; Stop 123
tcaaactcctcactatctttggaat

SEQ ID NO: 473734 - DNA, 25 bp, Artificial
  probe
  misc_feature (1)..(25): SEQ ID NO: 7648; WAN024DHJ; Start 98; Stop 122
atcaaactcctcactatctttggaa

SEQ ID NO: 473735 - DNA, 25 bp, Artificial
  probe
  misc_feature (1)..(25): SEQ ID NO: 7648; WAN024DHJ; Start 97; Stop 121
aatcaaactcctcactatctttgga

SEQ ID NO: 473736 - DNA, 25 bp, Artificial
  probe
  misc_feature (1)..(25): SEQ ID NO: 7648; WAN024DHJ; Start 96; Stop 120
caatcaaactcctcactatctttgg

SEQ ID NO: 473737 - DNA, 25 bp, Artificial
  probe
  misc_feature (1)..(25): SEQ ID NO: 7648; WAN024DHJ; Start 20; Stop 44
cgaataatttctcaaagaatggcaa

SEQ ID NO: 473738 - DNA, 25 bp, Artificial
  probe
  misc_feature (1)..(25): SEQ ID NO: 7648; WAN024DHJ; Start 17; Stop 41
ttgcgaataatttctcaaagaatgg

SEQ ID NO: 473739 - DNA, 25 bp, Artificial
  probe
  misc_feature (1)..(25): SEQ ID NO: 7648; WAN024DHJ; Start 95; Stop 119
acaatcaaactcctcactatctttg

SEQ ID NO: 473740 - DNA, 25 bp, Artificial
  probe
  misc_feature (1)..(25): SEQ ID NO: 7648; WAN024DHJ; Start 101; Stop 125
aaactcctcactatctttggaatat

SEQ ID NO: 473741 - DNA, 25 bp, Artificial
  probe
  misc_feature (1)..(25): SEQ ID NO: 7648; WAN024DHJ; Start 15; Stop 39
tgttgcgaataatttctcaaagaat

SEQ ID NO: 473742 - DNA, 25 bp, Artificial
  probe
  misc_feature (1)..(25): SEQ ID NO: 7648; WAN024DHJ; Start 14; Stop 38
atgttgcgaataatttctcaaagaa

SEQ ID NO: 473743 - DNA, 25 bp, Artificial
  probe
  misc_feature (1)..(25): SEQ ID NO: 7648; WAN024DHJ; Start 100; Stop 124
caaactcctcactatctttggaata

SEQ ID NO: 473744 - DNA, 25 bp, Artificial
  probe
  misc_feature (1)..(25): SEQ ID NO: 7648; WAN024DHJ; Start 16; Stop 40
gttgcgaataatttctcaaagaatg

SEQ ID NO: 473745 - DNA, 25 bp, Artificial
  probe
  misc_feature (1)..(25): SEQ ID NO: 7648; WAN024DHJ; Start 58; Stop 82
aattggtatcatactgatagcttgc

SEQ ID NO: 473746 - DNA, 25 bp, Artificial
  probe
  misc_feature (1)..(25): SEQ ID NO: 7648; WAN024DHJ; Start 59; Stop 83
attggtatcatactgatagcttgca

SEQ ID NO: 473747 - DNA, 25 bp, Artificial
  probe
  misc_feature (1)..(25): SEQ ID NO: 7648; WAN024DHJ; Start 103; Stop 127
actcctcactatctttggaatattt

SEQ ID NO: 473748 - DNA, 25 bp, Artificial
  probe
  misc_feature (1)..(25): SEQ ID NO: 7649; WAN024G32; Start 37; Stop 61
ctattctgtagcatgacatcggtaa

SEQ ID NO: 473749 - DNA, 25 bp, Artificial
  probe
  misc_feature (1)..(25): SEQ ID NO: 7649; WAN024G32; Start 239; Stop 263
cattaaggactgctacgactagacc

SEQ ID NO: 473750 - DNA, 25 bp, Artificial
  probe
  misc_feature (1)..(25): SEQ ID NO: 7649; WAN024G32; Start 238; Stop 262
ccattaaggactgctacgactagac

SEQ ID NO: 473751 - DNA, 25 bp, Artificial
  probe
  misc_feature (1)..(25): SEQ ID NO: 7649; WAN024G32; Start 36; Stop 60
actattctgtagcatgacatcggta

SEQ ID NO: 473752 - DNA, 25 bp, Artificial
  probe
  misc_feature (1)..(25): SEQ ID NO: 7649; WAN024G32; Start 240; Stop 264
attaaggactgctacgactagacca

SEQ ID NO: 473753 - DNA, 25 bp, Artificial
  probe
  misc_feature (1)..(25): SEQ ID NO: 7649; WAN024G32; Start 28; Stop 52
aacttggcactattctgtagcatga

SEQ ID NO: 473754 - DNA, 25 bp, Artificial
  probe
  misc_feature (1)..(25): SEQ ID NO: 7649; WAN024G32; Start 27; Stop 51
caacttggcactattctgtagcatg

SEQ ID NO: 473755 - DNA, 25 bp, Artificial
  probe
  misc_feature (1)..(25): SEQ ID NO: 7649; WAN024G32; Start 236; Stop 260
ctccattaaggactgctacgactag

SEQ ID NO: 473756 - DNA, 25 bp, Artificial
  probe
  misc_feature (1)..(25): SEQ ID NO: 7649; WAN024G32; Start 235; Stop 259
tctccattaaggactgctacgacta

SEQ ID NO: 473757 - DNA, 25 bp, Artificial
  probe
  misc_feature (1)..(25): SEQ ID NO: 7649; WAN024G32; Start 29; Stop 53
acttggcactattctgtagcatgac

SEQ ID NO: 473758 - DNA, 25 bp, Artificial
  probe
  misc_feature (1)..(25): SEQ ID NO: 7649; WAN024G32; Start 31; Stop 55
ttggcactattctgtagcatgacat

SEQ ID NO: 473759 - DNA, 25 bp, Artificial
  probe
  misc_feature (1)..(25): SEQ ID NO: 7649; WAN024G32; Start 237; Stop 261
tccattaaggactgctacgactaga

SEQ ID NO: 473760 - DNA, 25 bp, Artificial
  probe
  misc_feature (1)..(25): SEQ ID NO: 7649; WAN024G32; Start 35; Stop 59
cactattctgtagcatgacatcggt

SEQ ID NO: 473761 - DNA, 25 bp, Artificial
  probe
  misc_feature (1)..(25): SEQ ID NO: 7649; WAN024G32; Start 222; Stop 246
cttgtcaaaccgttctccattaagg

SEQ ID NO: 473762 - DNA, 25 bp, Artificial
  probe
  misc_feature (1)..(25): SEQ ID NO: 7649; WAN024G32; Start 32; Stop 56
tggcactattctgtagcatgacatc

SEQ ID NO: 473763 - DNA, 25 bp, Artificial
  probe
  misc_feature (1)..(25): SEQ ID NO: 7649; WAN024G32; Start 22; Stop 46
aagaccaacttggcactattctgta

SEQ ID NO: 473764 - DNA, 25 bp, Artificial
  probe
  misc_feature (1)..(25): SEQ ID NO: 7649; WAN024G32; Start 38; Stop 62
tattctgtagcatgacatcggtaaa

SEQ ID NO: 473765 - DNA, 25 bp, Artificial
  probe
  misc_feature (1)..(25): SEQ ID NO: 7649; WAN024G32; Start 30; Stop 54
cttggcactattctgtagcatgaca

SEQ ID NO: 473766 - DNA, 25 bp, Artificial
  probe
  misc_feature (1)..(25): SEQ ID NO: 7649; WAN024G32; Start 233; Stop 257
gttctccattaaggactgctacgac

SEQ ID NO: 473767 - DNA, 25 bp, Artificial
  probe
  misc_feature (1)..(25): SEQ ID NO: 7649; WAN024G32; Start 241; Stop 265
ttaaggactgctacgactagaccag

SEQ ID NO: 473768 - DNA, 25 bp, Artificial
  probe
  misc_feature (1)..(25): SEQ ID NO: 7649; WAN024G32; Start 23; Stop 47
agaccaacttggcactattctgtag

SEQ ID NO: 473769 - DNA, 25 bp, Artificial
  probe
  misc_feature (1)..(25): SEQ ID NO: 7649; WAN024G32; Start 234; Stop 258
ttctccattaaggactgctacgact

SEQ ID NO: 473770 - DNA, 25 bp, Artificial
  probe
  misc_feature (1)..(25): SEQ ID NO: 7649; WAN024G32; Start 221; Stop 245
gcttgtcaaaccgttctccattaag

SEQ ID NO: 473771 - DNA, 25 bp, Artificial
  probe
  misc_feature (1)..(25): SEQ ID NO: 7649; WAN024G32; Start 229; Stop 253
aaccgttctccattaaggactgcta

SEQ ID NO: 473772 - DNA, 25 bp, Artificial
  probe
  misc_feature (1)..(25): SEQ ID NO: 7649; WAN024G32; Start 34; Stop 58
gcactattctgtagcatgacatcgg

SEQ ID NO: 473773 - DNA, 25 bp, Artificial
  probe
  misc_feature (1)..(25): SEQ ID NO: 7649; WAN024G32; Start 33; Stop 57
ggcactattctgtagcatgacatcg

SEQ ID NO: 473774 - DNA, 25 bp, Artificial
  probe
  misc_feature (1)..(25): SEQ ID NO: 7649; WAN024G32; Start 26; Stop 50
ccaacttggcactattctgtagcat

SEQ ID NO: 473775 - DNA, 25 bp, Artificial
  probe
  misc_feature (1)..(25): SEQ ID NO: 7649; WAN024G32; Start 223; Stop 247
ttgtcaaaccgttctccattaagga

SEQ ID NO: 473776 - DNA, 25 bp, Artificial
  probe
  misc_feature (1)..(25): SEQ ID NO: 7649; WAN024G32; Start 184; Stop 208
agttttaattcggtgtcatctggaa

SEQ ID NO: 473777 - DNA, 25 bp, Artificial
  probe
  misc_feature (1)..(25): SEQ ID NO: 7649; WAN024G32; Start 183; Stop 207
gagttttaattcggtgtcatctgga

SEQ ID NO: 473778 - DNA, 25 bp, Artificial
  probe
  misc_feature (1)..(25): SEQ ID NO: 7649; WAN024G32; Start 226; Stop 250
tcaaaccgttctccattaaggactg

SEQ ID NO: 473779 - DNA, 25 bp, Artificial
  probe
  misc_feature (1)..(25): SEQ ID NO: 7649; WAN024G32; Start 225; Stop 249
gtcaaaccgttctccattaaggact

SEQ ID NO: 473780 - DNA, 25 bp, Artificial
  probe
  misc_feature (1)..(25): SEQ ID NO: 7649; WAN024G32; Start 181; Stop 205
ttgagttttaattcggtgtcatctg

SEQ ID NO: 473781 - DNA, 25 bp, Artificial
  probe
  misc_feature (1)..(25): SEQ ID NO: 7650; WAN024C2S; Start 151; Stop 175
ggcttcctatcaagtgttaagagta

SEQ ID NO: 473782 - DNA, 25 bp, Artificial
  probe
  misc_feature (1)..(25): SEQ ID NO: 7650; WAN024C2S; Start 152; Stop 176
gcttcctatcaagtgttaagagtaa

SEQ ID NO: 473783 - DNA, 25 bp, Artificial
  probe
  misc_feature (1)..(25): SEQ ID NO: 7650; WAN024C2S; Start 150; Stop 174
aggcttcctatcaagtgttaagagt

SEQ ID NO: 473784 - DNA, 25 bp, Artificial
  probe
  misc_feature (1)..(25): SEQ ID NO: 7650; WAN024C2S; Start 253; Stop 277
atatctaccaatccctcaacttcac

SEQ ID NO: 473785 - DNA, 25 bp, Artificial
  probe
  misc_feature (1)..(25): SEQ ID NO: 7650; WAN024C2S; Start 261; Stop 285
caatccctcaacttcaccttcataa

SEQ ID NO: 473786 - DNA, 25 bp, Artificial
  probe
  misc_feature (1)..(25): SEQ ID NO: 7650; WAN024C2S; Start 252; Stop 276
aatatctaccaatccctcaacttca

SEQ ID NO: 473787 - DNA, 25 bp, Artificial
  probe
  misc_feature (1)..(25): SEQ ID NO: 7650; WAN024C2S; Start 254; Stop 278
tatctaccaatccctcaacttcacc

SEQ ID NO: 473788 - DNA, 25 bp, Artificial
  probe
  misc_feature (1)..(25): SEQ ID NO: 7650; WAN024C2S; Start 251; Stop 275
aaatatctaccaatccctcaacttc

SEQ ID NO: 473789 - DNA, 25 bp, Artificial
  probe
  misc_feature (1)..(25): SEQ ID NO: 7650; WAN024C2S; Start 260; Stop 284
ccaatccctcaacttcaccttcata

SEQ ID NO: 473790 - DNA, 25 bp, Artificial
  probe
  misc_feature (1)..(25): SEQ ID NO: 7650; WAN024C2S; Start 149; Stop 173
taggcttcctatcaagtgttaagag

SEQ ID NO: 473791 - DNA, 25 bp, Artificial
  probe
  misc_feature (1)..(25): SEQ ID NO: 7650; WAN024C2S; Start 148; Stop 172
ctaggcttcctatcaagtgttaaga

SEQ ID NO: 473792 - DNA, 25 bp, Artificial
  probe
  misc_feature (1)..(25): SEQ ID NO: 7650; WAN024C2S; Start 147; Stop 171
tctaggcttcctatcaagtgttaag

SEQ ID NO: 473793 - DNA, 25 bp, Artificial
  probe
  misc_feature (1)..(25): SEQ ID NO: 7650; WAN024C2S; Start 146; Stop 170
ctctaggcttcctatcaagtgttaa

SEQ ID NO: 473794 - DNA, 25 bp, Artificial
  probe
  misc_feature (1)..(25): SEQ ID NO: 7650; WAN024C2S; Start 164; Stop 188
gtgttaagagtaaactttcaaacca

SEQ ID NO: 473795 - DNA, 25 bp, Artificial
  probe
  misc_feature (1)..(25): SEQ ID NO: 7650; WAN024C2S; Start 141; Stop 165
aattgctctaggcttcctatcaagt

SEQ ID NO: 473796 - DNA, 25 bp, Artificial
  probe
  misc_feature (1)..(25): SEQ ID NO: 7650; WAN024C2S; Start 145; Stop 169
gctctaggcttcctatcaagtgtta

SEQ ID NO: 473797 - DNA, 25 bp, Artificial
  probe
  misc_feature (1)..(25): SEQ ID NO: 7650; WAN024C2S; Start 163; Stop 187
agtgttaagagtaaactttcaaacc

SEQ ID NO: 473798 - DNA, 25 bp, Artificial
  probe
  misc_feature (1)..(25): SEQ ID NO: 7650; WAN024C2S; Start 257; Stop 281
ctaccaatccctcaacttcaccttc

SEQ ID NO: 473799 - DNA, 25 bp, Artificial
  probe
  misc_feature (1)..(25): SEQ ID NO: 7650; WAN024C2S; Start 255; Stop 279
atctaccaatccctcaacttcacct

SEQ ID NO: 473800 - DNA, 25 bp, Artificial
  probe
  misc_feature (1)..(25): SEQ ID NO: 7650; WAN024C2S; Start 142; Stop 166
attgctctaggcttcctatcaagtg

SEQ ID NO: 473801 - DNA, 25 bp, Artificial
  probe
  misc_feature (1)..(25): SEQ ID NO: 7650; WAN024C2S; Start 227; Stop 251
aaccaataaagcgaccttcctcaaa

SEQ ID NO: 473802 - DNA, 25 bp, Artificial
  probe
  misc_feature (1)..(25): SEQ ID NO: 7650; WAN024C2S; Start 256; Stop 280
tctaccaatccctcaacttcacctt

SEQ ID NO: 473803 - DNA, 25 bp, Artificial
  probe
  misc_feature (1)..(25): SEQ ID NO: 7650; WAN024C2S; Start 165; Stop 189
tgttaagagtaaactttcaaaccat

SEQ ID NO: 473804 - DNA, 25 bp, Artificial
  probe
  misc_feature (1)..(25): SEQ ID NO: 7650; WAN024C2S; Start 155; Stop 179
tcctatcaagtgttaagagtaaact

SEQ ID NO: 473805 - DNA, 25 bp, Artificial
  probe
  misc_feature (1)..(25): SEQ ID NO: 7650; WAN024C2S; Start 258; Stop 282
taccaatccctcaacttcaccttca

SEQ ID NO: 473806 - DNA, 25 bp, Artificial
  probe
  misc_feature (1)..(25): SEQ ID NO: 7650; WAN024C2S; Start 47; Stop 71
ttctcgcggaattacatataacatt

SEQ ID NO: 473807 - DNA, 25 bp, Artificial
  probe
  misc_feature (1)..(25): SEQ ID NO: 7650; WAN024C2S; Start 226; Stop 250
caaccaataaagcgaccttcctcaa

SEQ ID NO: 473808 - DNA, 25 bp, Artificial
  probe
  misc_feature (1)..(25): SEQ ID NO: 7650; WAN024C2S; Start 175; Stop 199
aaactttcaaaccattttaatcccc

SEQ ID NO: 473809 - DNA, 25 bp, Artificial
  probe
  misc_feature (1)..(25): SEQ ID NO: 7650; WAN024C2S; Start 154; Stop 178
ttcctatcaagtgttaagagtaaac

SEQ ID NO: 473810 - DNA, 25 bp, Artificial
  probe
  misc_feature (1)..(25): SEQ ID NO: 7650; WAN024C2S; Start 48; Stop 72
tctcgcggaattacatataacatta

SEQ ID NO: 473811 - DNA, 25 bp, Artificial
  probe
  misc_feature (1)..(25): SEQ ID NO: 7650; WAN024C2S; Start 259; Stop 283
accaatccctcaacttcaccttcat

SEQ ID NO: 473812 - DNA, 25 bp, Artificial
  probe
  misc_feature (1)..(25): SEQ ID NO: 7650; WAN024C2S; Start 153; Stop 177
cttcctatcaagtgttaagagtaaa

SEQ ID NO: 473813 - DNA, 25 bp, Artificial
  probe
  misc_feature (1)..(25): SEQ ID NO: 7650; WAN024C2S; Start 144; Stop 168
tgctctaggcttcctatcaagtgtt

SEQ ID NO: 473814 - DNA, 25 bp, Artificial
  probe
  misc_feature (1)..(25): SEQ ID NO: 7651; WAN024CUH; Start 44; Stop 68
aagccatacgagtttccagagataa

SEQ ID NO: 473815 - DNA, 25 bp, Artificial
  probe
  misc_feature (1)..(25): SEQ ID NO: 7651; WAN024CUH; Start 45; Stop 69
agccatacgagtttccagagataaa

SEQ ID NO: 473816 - DNA, 25 bp, Artificial
  probe
  misc_feature (1)..(25): SEQ ID NO: 7651; WAN024CUH; Start 43; Stop 67
caagccatacgagtttccagagata

SEQ ID NO: 473817 - DNA, 25 bp, Artificial
  probe
  misc_feature (1)..(25): SEQ ID NO: 7651; WAN024CUH; Start 10; Stop 34
ttagaacacaggcataagcaagctc

SEQ ID NO: 473818 - DNA, 25 bp, Artificial
  probe
  misc_feature (1)..(25): SEQ ID NO: 7651; WAN024CUH; Start 46; Stop 70
gccatacgagtttccagagataaaa

SEQ ID NO: 473819 - DNA, 25 bp, Artificial
  probe
  misc_feature (1)..(25): SEQ ID NO: 7651; WAN024CUH; Start 5; Stop 29
tacttttagaacacaggcataagca

SEQ ID NO: 473820 - DNA, 25 bp, Artificial
  probe
  misc_feature (1)..(25): SEQ ID NO: 7651; WAN024CUH; Start 7; Stop 31
cttttagaacacaggcataagcaag

SEQ ID NO: 473821 - DNA, 25 bp, Artificial
  probe
  misc_feature (1)..(25): SEQ ID NO: 7651; WAN024CUH; Start 6; Stop 30
acttttagaacacaggcataagcaa

SEQ ID NO: 473822 - DNA, 25 bp, Artificial
  probe
  misc_feature (1)..(25): SEQ ID NO: 7651; WAN024CUH; Start 2; Stop 26
tggtacttttagaacacaggcataa

SEQ ID NO: 473823 - DNA, 25 bp, Artificial
  probe
  misc_feature (1)..(25): SEQ ID NO: 7651; WAN024CUH; Start 1; Stop 25
ttggtacttttagaacacaggcata

SEQ ID NO: 473824 - DNA, 25 bp, Artificial
  probe
  misc_feature (1)..(25): SEQ ID NO: 7651; WAN024CUH; Start 42; Stop 66
acaagccatacgagtttccagagat

SEQ ID NO: 473825 - DNA, 25 bp, Artificial
  probe
  misc_feature (1)..(25): SEQ ID NO: 7651; WAN024CUH; Start 4; Stop 28
gtacttttagaacacaggcataagc

SEQ ID NO: 473826 - DNA, 25 bp, Artificial
  probe
  misc_feature (1)..(25): SEQ ID NO: 7651; WAN024CUH; Start 3; Stop 27
ggtacttttagaacacaggcataag

SEQ ID NO: 473827 - DNA, 25 bp, Artificial
  probe
  misc_feature (1)..(25): SEQ ID NO: 7651; WAN024CUH; Start 9; Stop 33
tttagaacacaggcataagcaagct

SEQ ID NO: 473828 - DNA, 25 bp, Artificial
  probe
  misc_feature (1)..(25): SEQ ID NO: 7651; WAN024CUH; Start 8; Stop 32
ttttagaacacaggcataagcaagc

SEQ ID NO: 473829 - DNA, 25 bp, Artificial
  probe
  misc_feature (1)..(25): SEQ ID NO: 7651; WAN024CUH; Start 41; Stop 65
cacaagccatacgagtttccagaga

SEQ ID NO: 473830 - DNA, 25 bp, Artificial
  probe
  misc_feature (1)..(25): SEQ ID NO: 7651; WAN024CUH; Start 11; Stop 35
tagaacacaggcataagcaagctcc

SEQ ID NO: 473831 - DNA, 25 bp, Artificial
  probe
  misc_feature (1)..(25): SEQ ID NO: 7651; WAN024CUH; Start 76; Stop 100
cttggggtgatcaatcaaagggttg

SEQ ID NO: 473832 - DNA, 25 bp, Artificial
  probe
  misc_feature (1)..(25): SEQ ID NO: 7651; WAN024CUH; Start 75; Stop 99
tcttggggtgatcaatcaaagggtt

SEQ ID NO: 473833 - DNA, 25 bp, Artificial
  probe
  misc_feature (1)..(25): SEQ ID NO: 7651; WAN024CUH; Start 70; Stop 94
aaggctcttggggtgatcaatcaaa

SEQ ID NO: 473834 - DNA, 25 bp, Artificial
  probe
  misc_feature (1)..(25): SEQ ID NO: 7651; WAN024CUH; Start 69; Stop 93
aaaggctcttggggtgatcaatcaa

SEQ ID NO: 473835 - DNA, 25 bp, Artificial
  probe
  misc_feature (1)..(25): SEQ ID NO: 7651; WAN024CUH; Start 68; Stop 92
aaaaggctcttggggtgatcaatca

SEQ ID NO: 473836 - DNA, 25 bp, Artificial
  probe
  misc_feature (1)..(25): SEQ ID NO: 7651; WAN024CUH; Start 74; Stop 98
ctcttggggtgatcaatcaaagggt

SEQ ID NO: 473837 - DNA, 25 bp, Artificial
  probe
  misc_feature (1)..(25): SEQ ID NO: 7651; WAN024CUH; Start 71; Stop 95
aggctcttggggtgatcaatcaaag

SEQ ID NO: 473838 - DNA, 25 bp, Artificial
  probe
  misc_feature (1)..(25): SEQ ID NO: 7651; WAN024CUH; Start 77; Stop 101
ttggggtgatcaatcaaagggttga

SEQ ID NO: 473839 - DNA, 25 bp, Artificial
  probe
  misc_feature (1)..(25): SEQ ID NO: 7651; WAN024CUH; Start 78; Stop 102
tggggtgatcaatcaaagggttgat

SEQ ID NO: 473840 - DNA, 25 bp, Artificial
  probe
  misc_feature (1)..(25): SEQ ID NO: 7652; WAN024BSB; Start 6; Stop 30
gagagagctactcgtgagtctgatc

SEQ ID NO: 473841 - DNA, 25 bp, Artificial
  probe
  misc_feature (1)..(25): SEQ ID NO: 7652; WAN024BSB; Start 5; Stop 29
tgagagagctactcgtgagtctgat

SEQ ID NO: 473842 - DNA, 25 bp, Artificial
  probe
  misc_feature (1)..(25): SEQ ID NO: 7652; WAN024BSB; Start 4; Stop 28
gtgagagagctactcgtgagtctga

SEQ ID NO: 473843 - DNA, 25 bp, Artificial
  probe
  misc_feature (1)..(25): SEQ ID NO: 7652; WAN024BSB; Start 7; Stop 31
agagagctactcgtgagtctgatcg

SEQ ID NO: 473844 - DNA, 25 bp, Artificial
  probe
  misc_feature (1)..(25): SEQ ID NO: 7652; WAN024BSB; Start 25; Stop 49
ctgatcggagacgttgaagagcttt

SEQ ID NO: 473845 - DNA, 25 bp, Artificial
  probe
  misc_feature (1)..(25): SEQ ID NO: 7652; WAN024BSB; Start 21; Stop 45
gagtctgatcggagacgttgaagag

SEQ ID NO: 473846 - DNA, 25 bp, Artificial
  probe
  misc_feature (1)..(25): SEQ ID NO: 7652; WAN024BSB; Start 49; Stop 73
tttgttcaagacataaaagaaaatg

SEQ ID NO: 473847 - DNA, 25 bp, Artificial
  probe
  misc_feature (1)..(25): SEQ ID NO: 7652; WAN024BSB; Start 19; Stop 43
gtgagtctgatcggagacgttgaag

SEQ ID NO: 473848 - DNA, 25 bp, Artificial
  probe
  misc_feature (1)..(25): SEQ ID NO: 7652; WAN024BSB; Start 26; Stop 50
tgatcggagacgttgaagagctttt

SEQ ID NO: 473849 - DNA, 25 bp, Artificial
  probe
  misc_feature (1)..(25): SEQ ID NO: 7652; WAN024BSB; Start 20; Stop 44
tgagtctgatcggagacgttgaaga

SEQ ID NO: 473850 - DNA, 25 bp, Artificial
  probe
  misc_feature (1)..(25): SEQ ID NO: 7652; WAN024BSB; Start 50; Stop 74
ttgttcaagacataaaagaaaatgt

SEQ ID NO: 473851 - DNA, 25 bp, Artificial
  probe
  misc_feature (1)..(25): SEQ ID NO: 7652; WAN024BSB; Start 51; Stop 75
tgttcaagacataaaagaaaatgta

SEQ ID NO: 473852 - DNA, 25 bp, Artificial
  probe
  misc_feature (1)..(25): SEQ ID NO: 7652; WAN024BSB; Start 54; Stop 78
tcaagacataaaagaaaatgtaagt

SEQ ID NO: 473853 - DNA, 25 bp, Artificial
  probe
  misc_feature (1)..(25): SEQ ID NO: 7653; WAN024D5H; Start 2; Stop 26
tggtgctttctcaagtttctattct

SEQ ID NO: 473854 - DNA, 25 bp, Artificial
  probe
  misc_feature (1)..(25): SEQ ID NO: 7653; WAN024D5H; Start 3; Stop 27
ggtgctttctcaagtttctattctt

SEQ ID NO: 473855 - DNA, 25 bp, Artificial
  probe
  misc_feature (1)..(25): SEQ ID NO: 7653; WAN024D5H; Start 1; Stop 25
ttggtgctttctcaagtttctattc

SEQ ID NO: 473856 - DNA, 25 bp, Artificial
  probe
  misc_feature (1)..(25): SEQ ID NO: 7653; WAN024D5H; Start 4; Stop 28
gtgctttctcaagtttctattcttc

SEQ ID NO: 473857 - DNA, 25 bp, Artificial
  probe
  misc_feature (1)..(25): SEQ ID NO: 7653; WAN024D5H; Start 5; Stop 29
tgctttctcaagtttctattcttct

SEQ ID NO: 473858 - DNA, 25 bp, Artificial
  probe
  misc_feature (1)..(25): SEQ ID NO: 7653; WAN024D5H; Start 6; Stop 30
gctttctcaagtttctattcttctc

SEQ ID NO: 473859 - DNA, 25 bp, Artificial
  probe
  misc_feature (1)..(25): SEQ ID NO: 7653; WAN024D5H; Start 10; Stop 34
tctcaagtttctattcttctccttt

SEQ ID NO: 473860 - DNA, 25 bp, Artificial
  probe
  misc_feature (1)..(25): SEQ ID NO: 7653; WAN024D5H; Start 9; Stop 33
ttctcaagtttctattcttctcctt

SEQ ID NO: 473861 - DNA, 25 bp, Artificial
  probe
  misc_feature (1)..(25): SEQ ID NO: 7653; WAN024D5H; Start 8; Stop 32
tttctcaagtttctattcttctcct

SEQ ID NO: 473862 - DNA, 25 bp, Artificial
  probe
  misc_feature (1)..(25): SEQ ID NO: 7653; WAN024D5H; Start 7; Stop 31
ctttctcaagtttctattcttctcc

SEQ ID NO: 473863 - DNA, 25 bp, Artificial
  probe
  misc_feature (1)..(25): SEQ ID NO: 7653; WAN024D5H; Start 54; Stop 78
ctcttccatgtctggtgttggtaag

SEQ ID NO: 473864 - DNA, 25 bp, Artificial
  probe
  misc_feature (1)..(25): SEQ ID NO: 7653; WAN024D5H; Start 38; Stop 62
taaagactgtaaatcgctcttccat

SEQ ID NO: 473865 - DNA, 25 bp, Artificial
  probe
  misc_feature (1)..(25): SEQ ID NO: 7653; WAN024D5H; Start 36; Stop 60
tctaaagactgtaaatcgctcttcc

SEQ ID NO: 473866 - DNA, 25 bp, Artificial
  probe
  misc_feature (1)..(25): SEQ ID NO: 7653; WAN024D5H; Start 37; Stop 61
ctaaagactgtaaatcgctcttcca

SEQ ID NO: 473867 - DNA, 25 bp, Artificial
  probe
  misc_feature (1)..(25): SEQ ID NO: 7653; WAN024D5H; Start 43; Stop 67
actgtaaatcgctcttccatgtctg

SEQ ID NO: 473868 - DNA, 25 bp, Artificial
  probe
  misc_feature (1)..(25): SEQ ID NO: 7653; WAN024D5H; Start 35; Stop 59
ttctaaagactgtaaatcgctcttc

SEQ ID NO: 473869 - DNA, 25 bp, Artificial
  probe
  misc_feature (1)..(25): SEQ ID NO: 7653; WAN024D5H; Start 34; Stop 58
tttctaaagactgtaaatcgctctt

SEQ ID NO: 473870 - DNA, 25 bp, Artificial
  probe
  misc_feature (1)..(25): SEQ ID NO: 7653; WAN024D5H; Start 39; Stop 63
aaagactgtaaatcgctcttccatg

SEQ ID NO: 473871 - DNA, 25 bp, Artificial
  probe
  misc_feature (1)..(25): SEQ ID NO: 7653; WAN024D5H; Start 42; Stop 66
gactgtaaatcgctcttccatgtct

SEQ ID NO: 473872 - DNA, 25 bp, Artificial
  probe
  misc_feature (1)..(25): SEQ ID NO: 7653; WAN024D5H; Start 41; Stop 65
agactgtaaatcgctcttccatgtc

SEQ ID NO: 473873 - DNA, 25 bp, Artificial
  probe
  misc_feature (1)..(25): SEQ ID NO: 7653; WAN024D5H; Start 33; Stop 57
ttttctaaagactgtaaatcgctct

SEQ ID NO: 473874 - DNA, 25 bp, Artificial
  probe
  misc_feature (1)..(25): SEQ ID NO: 7653; WAN024D5H; Start 40; Stop 64
aagactgtaaatcgctcttccatgt

SEQ ID NO: 473875 - DNA, 25 bp, Artificial
  probe
  misc_feature (1)..(25): SEQ ID NO: 7653; WAN024D5H; Start 61; Stop 85
atgtctggtgttggtaagccatctc

SEQ ID NO: 473876 - DNA, 25 bp, Artificial
  probe
  misc_feature (1)..(25): SEQ ID NO: 7653; WAN024D5H; Start 44; Stop 68
ctgtaaatcgctcttccatgtctgg

SEQ ID NO: 473877 - DNA, 25 bp, Artificial
  probe
  misc_feature (1)..(25): SEQ ID NO: 7653; WAN024D5H; Start 11; Stop 35
ctcaagtttctattcttctcctttt

SEQ ID NO: 473878 - DNA, 25 bp, Artificial
  probe
  misc_feature (1)..(25): SEQ ID NO: 7653; WAN024D5H; Start 46; Stop 70
gtaaatcgctcttccatgtctggtg

SEQ ID NO: 473879 - DNA, 25 bp, Artificial
  probe
  misc_feature (1)..(25): SEQ ID NO: 7653; WAN024D5H; Start 55; Stop 79
tcttccatgtctggtgttggtaagc

SEQ ID NO: 473880 - DNA, 25 bp, Artificial
  probe
  misc_feature (1)..(25): SEQ ID NO: 7653; WAN024D5H; Start 53; Stop 77
gctcttccatgtctggtgttggtaa

SEQ ID NO: 473881 - DNA, 25 bp, Artificial
  probe
  misc_feature (1)..(25): SEQ ID NO: 7653; WAN024D5H; Start 60; Stop 84
catgtctggtgttggtaagccatct

SEQ ID NO: 473882 - DNA, 25 bp, Artificial
  probe
  misc_feature (1)..(25): SEQ ID NO: 7653; WAN024D5H; Start 47; Stop 71
taaatcgctcttccatgtctggtgt

SEQ ID NO: 473883 - DNA, 25 bp, Artificial
  probe
  misc_feature (1)..(25): SEQ ID NO: 7653; WAN024D5H; Start 45; Stop 69
tgtaaatcgctcttccatgtctggt

SEQ ID NO: 473884 - DNA, 25 bp, Artificial
  probe
  misc_feature (1)..(25): SEQ ID NO: 7653; WAN024D5H; Start 87; Stop 111
caaaacttggcttccatatgaacac

SEQ ID NO: 473885 - DNA, 25 bp, Artificial
  probe
  misc_feature (1)..(25): SEQ ID NO: 7653; WAN024D5H; Start 48; Stop 72
aaatcgctcttccatgtctggtgtt

SEQ ID NO: 473886 - DNA, 25 bp, Artificial
  probe
  misc_feature (1)..(25): SEQ ID NO: 7654; WAN024BMG; Start 60; Stop 84
aactagaatagtacgcctctacttc

SEQ ID NO: 473887 - DNA, 25 bp, Artificial
  probe
  misc_feature (1)..(25): SEQ ID NO: 7654; WAN024BMG; Start 57; Stop 81
tgaaactagaatagtacgcctctac

SEQ ID NO: 473888 - DNA, 25 bp, Artificial
  probe
  misc_feature (1)..(25): SEQ ID NO: 7654; WAN024BMG; Start 55; Stop 79
attgaaactagaatagtacgcctct

SEQ ID NO: 473889 - DNA, 25 bp, Artificial
  probe
  misc_feature (1)..(25): SEQ ID NO: 7654; WAN024BMG; Start 58; Stop 82
gaaactagaatagtacgcctctact

SEQ ID NO: 473890 - DNA, 25 bp, Artificial
  probe
  misc_feature (1)..(25): SEQ ID NO: 7654; WAN024BMG; Start 59; Stop 83
aaactagaatagtacgcctctactt

SEQ ID NO: 473891 - DNA, 25 bp, Artificial
  probe
  misc_feature (1)..(25): SEQ ID NO: 7654; WAN024BMG; Start 56; Stop 80
ttgaaactagaatagtacgcctcta

SEQ ID NO: 473892 - DNA, 25 bp, Artificial
  probe
  misc_feature (1)..(25): SEQ ID NO: 7654; WAN024BMG; Start 1; Stop 25
ttggtggaggaaaataggttgaatt

SEQ ID NO: 473893 - DNA, 25 bp, Artificial
  probe
  misc_feature (1)..(25): SEQ ID NO: 7654; WAN024BMG; Start 54; Stop 78
tattgaaactagaatagtacgcctc

SEQ ID NO: 473894 - DNA, 25 bp, Artificial
  probe
  misc_feature (1)..(25): SEQ ID NO: 7654; WAN024BMG; Start 3; Stop 27
ggtggaggaaaataggttgaatttg

SEQ ID NO: 473895 - DNA, 25 bp, Artificial
  probe
  misc_feature (1)..(25): SEQ ID NO: 7654; WAN024BMG; Start 4; Stop 28
gtggaggaaaataggttgaatttga

SEQ ID NO: 473896 - DNA, 25 bp, Artificial
  probe
  misc_feature (1)..(25): SEQ ID NO: 7654; WAN024BMG; Start 2; Stop 26
tggtggaggaaaataggttgaattt

SEQ ID NO: 473897 - DNA, 25 bp, Artificial
  probe
  misc_feature (1)..(25): SEQ ID NO: 7654; WAN024BMG; Start 53; Stop 77
atattgaaactagaatagtacgcct

SEQ ID NO: 473898 - DNA, 25 bp, Artificial
  probe
  misc_feature (1)..(25): SEQ ID NO: 7654; WAN024BMG; Start 5; Stop 29
tggaggaaaataggttgaatttgaa

SEQ ID NO: 473899 - DNA, 25 bp, Artificial
  probe
  misc_feature (1)..(25): SEQ ID NO: 7654; WAN024BMG; Start 12; Stop 36
aaataggttgaatttgaaatggaaa

SEQ ID NO: 473900 - DNA, 25 bp, Artificial
  probe
  misc_feature (1)..(25): SEQ ID NO: 7654; WAN024BMG; Start 6; Stop 30
ggaggaaaataggttgaatttgaaa

SEQ ID NO: 473901 - DNA, 25 bp, Artificial
  probe
  misc_feature (1)..(25): SEQ ID NO: 7654; WAN024BMG; Start 9; Stop 33
ggaaaataggttgaatttgaaatgg

SEQ ID NO: 473902 - DNA, 25 bp, Artificial
  probe
  misc_feature (1)..(25): SEQ ID NO: 7654; WAN024BMG; Start 52; Stop 76
tatattgaaactagaatagtacgcc

SEQ ID NO: 473903 - DNA, 25 bp, Artificial
  probe
  misc_feature (1)..(25): SEQ ID NO: 7654; WAN024BMG; Start 10; Stop 34
gaaaataggttgaatttgaaatgga

SEQ ID NO: 473904 - DNA, 25 bp, Artificial
  probe
  misc_feature (1)..(25): SEQ ID NO: 7654; WAN024BMG; Start 8; Stop 32
aggaaaataggttgaatttgaaatg

SEQ ID NO: 473905 - DNA, 25 bp, Artificial
  probe
  misc_feature (1)..(25): SEQ ID NO: 7654; WAN024BMG; Start 13; Stop 37
aataggttgaatttgaaatggaaaa

SEQ ID NO: 473906 - DNA, 25 bp, Artificial
  probe
  misc_feature (1)..(25): SEQ ID NO: 7654; WAN024BMG; Start 7; Stop 31
gaggaaaataggttgaatttgaaat

SEQ ID NO: 473907 - DNA, 25 bp, Artificial
  probe
  misc_feature (1)..(25): SEQ ID NO: 7654; WAN024BMG; Start 11; Stop 35
aaaataggttgaatttgaaatggaa

SEQ ID NO: 473908 - DNA, 25 bp, Artificial
  probe
  misc_feature (1)..(25): SEQ ID NO: 7655; WAN024DQK; Start 1; Stop 25
ttggtgtttacttttgatgagatat

SEQ ID NO: 473909 - DNA, 25 bp, Artificial
  probe
  misc_feature (1)..(25): SEQ ID NO: 7655; WAN024DQK; Start 30; Stop 54
tttgtgttataatgtaaccgtaaac

SEQ ID NO: 473910 - DNA, 25 bp, Artificial
  probe
  misc_feature (1)..(25): SEQ ID NO: 7655; WAN024DQK; Start 46; Stop 70
accgtaaacaatagaaatttaaagg

SEQ ID NO: 473911 - DNA, 25 bp, Artificial
  probe
  misc_feature (1)..(25): SEQ ID NO: 7655; WAN024DQK; Start 40; Stop 64
aatgtaaccgtaaacaatagaaatt

SEQ ID NO: 473912 - DNA, 25 bp, Artificial
  probe
  misc_feature (1)..(25): SEQ ID NO: 7655; WAN024DQK; Start 32; Stop 56
tgtgttataatgtaaccgtaaacaa

SEQ ID NO: 473913 - DNA, 25 bp, Artificial
  probe
  misc_feature (1)..(25): SEQ ID NO: 7655; WAN024DQK; Start 31; Stop 55
ttgtgttataatgtaaccgtaaaca

SEQ ID NO: 473914 - DNA, 25 bp, Artificial
  probe
  misc_feature (1)..(25): SEQ ID NO: 7655; WAN024DQK; Start 47; Stop 71
ccgtaaacaatagaaatttaaagga

SEQ ID NO: 473915 - DNA, 25 bp, Artificial
  probe
  misc_feature (1)..(25): SEQ ID NO: 7655; WAN024DQK; Start 26; Stop 50
catatttgtgttataatgtaaccgt

SEQ ID NO: 473916 - DNA, 25 bp, Artificial
  probe
  misc_feature (1)..(25): SEQ ID NO: 7655; WAN024DQK; Start 25; Stop 49
tcatatttgtgttataatgtaaccg

SEQ ID NO: 473917 - DNA, 25 bp, Artificial
  probe
  misc_feature (1)..(25): SEQ ID NO: 7655; WAN024DQK; Start 2; Stop 26
tggtgtttacttttgatgagatatc

SEQ ID NO: 473918 - DNA, 25 bp, Artificial
  probe
  misc_feature (1)..(25): SEQ ID NO: 7655; WAN024DQK; Start 41; Stop 65
atgtaaccgtaaacaatagaaattt

SEQ ID NO: 473919 - DNA, 25 bp, Artificial
  probe
  misc_feature (1)..(25): SEQ ID NO: 7655; WAN024DQK; Start 29; Stop 53
atttgtgttataatgtaaccgtaaa

SEQ ID NO: 473920 - DNA, 25 bp, Artificial
  probe
  misc_feature (1)..(25): SEQ ID NO: 7655; WAN024DQK; Start 33; Stop 57
gtgttataatgtaaccgtaaacaat

SEQ ID NO: 473921 - DNA, 25 bp, Artificial
  probe
  misc_feature (1)..(25): SEQ ID NO: 7655; WAN024DQK; Start 42; Stop 66
tgtaaccgtaaacaatagaaattta

SEQ ID NO: 473922 - DNA, 25 bp, Artificial
  probe
  misc_feature (1)..(25): SEQ ID NO: 7655; WAN024DQK; Start 3; Stop 27
ggtgtttacttttgatgagatatca

SEQ ID NO: 473923 - DNA, 25 bp, Artificial
  probe
  misc_feature (1)..(25): SEQ ID NO: 7655; WAN024DQK; Start 4; Stop 28
gtgtttacttttgatgagatatcat

SEQ ID NO: 473924 - DNA, 25 bp, Artificial
  probe
  misc_feature (1)..(25): SEQ ID NO: 7656; WAN024BK8; Start 1; Stop 25
ttggttaagattgctgagatactgg

SEQ ID NO: 473925 - DNA, 25 bp, Artificial
  probe
  misc_feature (1)..(25): SEQ ID NO: 7656; WAN024BK8; Start 3; Stop 27
ggttaagattgctgagatactggtc

SEQ ID NO: 473926 - DNA, 25 bp, Artificial
  probe
  misc_feature (1)..(25): SEQ ID NO: 7656; WAN024BK8; Start 4; Stop 28
gttaagattgctgagatactggtcg

SEQ ID NO: 473927 - DNA, 25 bp, Artificial
  probe
  misc_feature (1)..(25): SEQ ID NO: 7656; WAN024BK8; Start 2; Stop 26
tggttaagattgctgagatactggt

SEQ ID NO: 473928 - DNA, 25 bp, Artificial
  probe
  misc_feature (1)..(25): SEQ ID NO: 7656; WAN024BK8; Start 8; Stop 32
agattgctgagatactggtcgataa

SEQ ID NO: 473929 - DNA, 25 bp, Artificial
  probe
  misc_feature (1)..(25): SEQ ID NO: 7656; WAN024BK8; Start 7; Stop 31
aagattgctgagatactggtcgata

SEQ ID NO: 473930 - DNA, 25 bp, Artificial
  probe
  misc_feature (1)..(25): SEQ ID NO: 7656; WAN024BK8; Start 6; Stop 30
taagattgctgagatactggtcgat

SEQ ID NO: 473931 - DNA, 25 bp, Artificial
  probe
  misc_feature (1)..(25): SEQ ID NO: 7656; WAN024BK8; Start 5; Stop 29
ttaagattgctgagatactggtcga

SEQ ID NO: 473932 - DNA, 25 bp, Artificial
  probe
  misc_feature (1)..(25): SEQ ID NO: 7656; WAN024BK8; Start 10; Stop 34
attgctgagatactggtcgataaag

SEQ ID NO: 473933 - DNA, 25 bp, Artificial
  probe
  misc_feature (1)..(25): SEQ ID NO: 7656; WAN024BK8; Start 9; Stop 33
gattgctgagatactggtcgataaa

SEQ ID NO: 473934 - DNA, 25 bp, Artificial
  probe
  misc_feature (1)..(25): SEQ ID NO: 7656; WAN024BK8; Start 11; Stop 35
ttgctgagatactggtcgataaagt

SEQ ID NO: 473935 - DNA, 25 bp, Artificial
  probe
  misc_feature (1)..(25): SEQ ID NO: 7656; WAN024BK8; Start 17; Stop 41
agatactggtcgataaagtgggaag

SEQ ID NO: 473936 - DNA, 25 bp, Artificial
  probe
  misc_feature (1)..(25): SEQ ID NO: 7656; WAN024BK8; Start 16; Stop 40
gagatactggtcgataaagtgggaa

SEQ ID NO: 473937 - DNA, 25 bp, Artificial
  probe
  misc_feature (1)..(25): SEQ ID NO: 7656; WAN024BK8; Start 14; Stop 38
ctgagatactggtcgataaagtggg

SEQ ID NO: 473938 - DNA, 25 bp, Artificial
  probe
  misc_feature (1)..(25): SEQ ID NO: 7656; WAN024BK8; Start 12; Stop 36
tgctgagatactggtcgataaagtg

SEQ ID NO: 473939 - DNA, 25 bp, Artificial
  probe
  misc_feature (1)..(25): SEQ ID NO: 7656; WAN024BK8; Start 45; Stop 69
cgaggggtatgacacttttaatgac

SEQ ID NO: 473940 - DNA, 25 bp, Artificial
  probe
  misc_feature (1)..(25): SEQ ID NO: 7656; WAN024BK8; Start 44; Stop 68
acgaggggtatgacacttttaatga

SEQ ID NO: 473941 - DNA, 25 bp, Artificial
  probe
  misc_feature (1)..(25): SEQ ID NO: 7656; WAN024BK8; Start 43; Stop 67
cacgaggggtatgacacttttaatg

SEQ ID NO: 473942 - DNA, 25 bp, Artificial
  probe
  misc_feature (1)..(25): SEQ ID NO: 7656; WAN024BK8; Start 15; Stop 39
tgagatactggtcgataaagtggga

SEQ ID NO: 473943 - DNA, 25 bp, Artificial
  probe
  misc_feature (1)..(25): SEQ ID NO: 7656; WAN024BK8; Start 13; Stop 37
gctgagatactggtcgataaagtgg

SEQ ID NO: 473944 - DNA, 25 bp, Artificial
  probe
  misc_feature (1)..(25): SEQ ID NO: 7656; WAN024BK8; Start 52; Stop 76
tatgacacttttaatgaccgtcgtc

SEQ ID NO: 473945 - DNA, 25 bp, Artificial
  probe
  misc_feature (1)..(25): SEQ ID NO: 7656; WAN024BK8; Start 18; Stop 42
gatactggtcgataaagtgggaagc

SEQ ID NO: 473946 - DNA, 25 bp, Artificial
  probe
  misc_feature (1)..(25): SEQ ID NO: 7656; WAN024BK8; Start 51; Stop 75
gtatgacacttttaatgaccgtcgt

SEQ ID NO: 473947 - DNA, 25 bp, Artificial
  probe
  misc_feature (1)..(25): SEQ ID NO: 7656; WAN024BK8; Start 42; Stop 66
ccacgaggggtatgacacttttaat

SEQ ID NO: 473948 - DNA, 25 bp, Artificial
  probe
  misc_feature (1)..(25): SEQ ID NO: 7656; WAN024BK8; Start 46; Stop 70
gaggggtatgacacttttaatgacc

SEQ ID NO: 473949 - DNA, 25 bp, Artificial
  probe
  misc_feature (1)..(25): SEQ ID NO: 7656; WAN024BK8; Start 49; Stop 73
gggtatgacacttttaatgaccgtc

SEQ ID NO: 473950 - DNA, 25 bp, Artificial
  probe
  misc_feature (1)..(25): SEQ ID NO: 7656; WAN024BK8; Start 50; Stop 74
ggtatgacacttttaatgaccgtcg

SEQ ID NO: 473951 - DNA, 25 bp, Artificial
  probe
  misc_feature (1)..(25): SEQ ID NO: 7656; WAN024BK8; Start 47; Stop 71
aggggtatgacacttttaatgaccg

SEQ ID NO: 473952 - DNA, 25 bp, Artificial
  probe
  misc_feature (1)..(25): SEQ ID NO: 7656; WAN024BK8; Start 19; Stop 43
atactggtcgataaagtgggaagcc

SEQ ID NO: 473953 - DNA, 25 bp, Artificial
  probe
  misc_feature (1)..(25): SEQ ID NO: 7656; WAN024BK8; Start 48; Stop 72
ggggtatgacacttttaatgaccgt

SEQ ID NO: 473954 - DNA, 25 bp, Artificial
  probe
  misc_feature (1)..(25): SEQ ID NO: 7656; WAN024BK8; Start 53; Stop 77
atgacacttttaatgaccgtcgtcg

SEQ ID NO: 473955 - DNA, 25 bp, Artificial
  probe
  misc_feature (1)..(25): SEQ ID NO: 7656; WAN024BK8; Start 41; Stop 65
gccacgaggggtatgacacttttaa

SEQ ID NO: 473956 - DNA, 25 bp, Artificial
  probe
  misc_feature (1)..(25): SEQ ID NO: 7657; WAN024F8V; Start 193; Stop 217
ttccttattgttcttctcaccatca

SEQ ID NO: 473957 - DNA, 25 bp, Artificial
  probe
  misc_feature (1)..(25): SEQ ID NO: 7657; WAN024F8V; Start 191; Stop 215
acttccttattgttcttctcaccat

SEQ ID NO: 473958 - DNA, 25 bp, Artificial
  probe
  misc_feature (1)..(25): SEQ ID NO: 7657; WAN024F8V; Start 194; Stop 218
tccttattgttcttctcaccatcag

SEQ ID NO: 473959 - DNA, 25 bp, Artificial
  probe
  misc_feature (1)..(25): SEQ ID NO: 7657; WAN024F8V; Start 192; Stop 216
cttccttattgttcttctcaccatc

SEQ ID NO: 473960 - DNA, 25 bp, Artificial
  probe
  misc_feature (1)..(25): SEQ ID NO: 7657; WAN024F8V; Start 12; Stop 36
tataccacttgattgttgccttgag

SEQ ID NO: 473961 - DNA, 25 bp, Artificial
  probe
  misc_feature (1)..(25): SEQ ID NO: 7657; WAN024F8V; Start 190; Stop 214
aacttccttattgttcttctcacca

SEQ ID NO: 473962 - DNA, 25 bp, Artificial
  probe
  misc_feature (1)..(25): SEQ ID NO: 7657; WAN024F8V; Start 196; Stop 220
cttattgttcttctcaccatcagcc

SEQ ID NO: 473963 - DNA, 25 bp, Artificial
  probe
  misc_feature (1)..(25): SEQ ID NO: 7657; WAN024F8V; Start 195; Stop 219
ccttattgttcttctcaccatcagc

SEQ ID NO: 473964 - DNA, 25 bp, Artificial
  probe
  misc_feature (1)..(25): SEQ ID NO: 7657; WAN024F8V; Start 44; Stop 68
tcaaagttggtaaattcaggtttcc

SEQ ID NO: 473965 - DNA, 25 bp, Artificial
  probe
  misc_feature (1)..(25): SEQ ID NO: 7657; WAN024F8V; Start 41; Stop 65
gcttcaaagttggtaaattcaggtt

SEQ ID NO: 473966 - DNA, 25 bp, Artificial
  probe
  misc_feature (1)..(25): SEQ ID NO: 7657; WAN024F8V; Start 189; Stop 213
aaacttccttattgttcttctcacc

SEQ ID NO: 473967 - DNA, 25 bp, Artificial
  probe
  misc_feature (1)..(25): SEQ ID NO: 7657; WAN024F8V; Start 7; Stop 31
atctgtataccacttgattgttgcc

SEQ ID NO: 473968 - DNA, 25 bp, Artificial
  probe
  misc_feature (1)..(25): SEQ ID NO: 7657; WAN024F8V; Start 6; Stop 30
tatctgtataccacttgattgttgc

SEQ ID NO: 473969 - DNA, 25 bp, Artificial
  probe
  misc_feature (1)..(25): SEQ ID NO: 7657; WAN024F8V; Start 11; Stop 35
gtataccacttgattgttgccttga

SEQ ID NO: 473970 - DNA, 25 bp, Artificial
  probe
  misc_feature (1)..(25): SEQ ID NO: 7657; WAN024F8V; Start 9; Stop 33
ctgtataccacttgattgttgcctt

SEQ ID NO: 473971 - DNA, 25 bp, Artificial
  probe
  misc_feature (1)..(25): SEQ ID NO: 7657; WAN024F8V; Start 10; Stop 34
tgtataccacttgattgttgccttg

SEQ ID NO: 473972 - DNA, 25 bp, Artificial
  probe
  misc_feature (1)..(25): SEQ ID NO: 7657; WAN024F8V; Start 43; Stop 67
ttcaaagttggtaaattcaggtttc

SEQ ID NO: 473973 - DNA, 25 bp, Artificial
  probe
  misc_feature (1)..(25): SEQ ID NO: 7657; WAN024F8V; Start 42; Stop 66
cttcaaagttggtaaattcaggttt

SEQ ID NO: 473974 - DNA, 25 bp, Artificial
  probe
  misc_feature (1)..(25): SEQ ID NO: 7657; WAN024F8V; Start 8; Stop 32
tctgtataccacttgattgttgcct

SEQ ID NO: 473975 - DNA, 25 bp, Artificial
  probe
  misc_feature (1)..(25): SEQ ID NO: 7657; WAN024F8V; Start 13; Stop 37
ataccacttgattgttgccttgagc

SEQ ID NO: 473976 - DNA, 25 bp, Artificial
  probe
  misc_feature (1)..(25): SEQ ID NO: 7657; WAN024F8V; Start 39; Stop 63
cagcttcaaagttggtaaattcagg

SEQ ID NO: 473977 - DNA, 25 bp, Artificial
  probe
  misc_feature (1)..(25): SEQ ID NO: 7657; WAN024F8V; Start 46; Stop 70
aaagttggtaaattcaggtttccac

SEQ ID NO: 473978 - DNA, 25 bp, Artificial
  probe
  misc_feature (1)..(25): SEQ ID NO: 7657; WAN024F8V; Start 45; Stop 69
caaagttggtaaattcaggtttcca

SEQ ID NO: 473979 - DNA, 25 bp, Artificial
  probe
  misc_feature (1)..(25): SEQ ID NO: 7657; WAN024F8V; Start 40; Stop 64
agcttcaaagttggtaaattcaggt

SEQ ID NO: 473980 - DNA, 25 bp, Artificial
  probe
  misc_feature (1)..(25): SEQ ID NO: 7657; WAN024F8V; Start 222; Stop 246
caatcaagtaggtttcaccgatttg

SEQ ID NO: 473981 - DNA, 25 bp, Artificial
  probe
  misc_feature (1)..(25): SEQ ID NO: 7657; WAN024F8V; Start 197; Stop 221
ttattgttcttctcaccatcagccc

SEQ ID NO: 473982 - DNA, 25 bp, Artificial
  probe
  misc_feature (1)..(25): SEQ ID NO: 7657; WAN024F8V; Start 252; Stop 276
ttgtcaagattgtccaaactcctga

SEQ ID NO: 473983 - DNA, 25 bp, Artificial
  probe
  misc_feature (1)..(25): SEQ ID NO: 7657; WAN024F8V; Start 3; Stop 27
ggttatctgtataccacttgattgt

SEQ ID NO: 473984 - DNA, 25 bp, Artificial
  probe
  misc_feature (1)..(25): SEQ ID NO: 7657; WAN024F8V; Start 221; Stop 245
ccaatcaagtaggtttcaccgattt

SEQ ID NO: 473985 - DNA, 25 bp, Artificial
  probe
  misc_feature (1)..(25): SEQ ID NO: 7657; WAN024F8V; Start 47; Stop 71
aagttggtaaattcaggtttccacc

SEQ ID NO: 473986 - DNA, 25 bp, Artificial
  probe
  misc_feature (1)..(25): SEQ ID NO: 7657; WAN024F8V; Start 5; Stop 29
ttatctgtataccacttgattgttg

SEQ ID NO: 473987 - DNA, 25 bp, Artificial
  probe
  misc_feature (1)..(25): SEQ ID NO: 7657; WAN024F8V; Start 4; Stop 28
gttatctgtataccacttgattgtt

SEQ ID NO: 473988 - DNA, 25 bp, Artificial
  probe
  misc_feature (1)..(25): SEQ ID NO: 7657; WAN024F8V; Start 223; Stop 247
aatcaagtaggtttcaccgatttgc

SEQ ID NO: 473989 - DNA, 25 bp, Artificial
  probe
  misc_feature (1)..(25): SEQ ID NO: 7658; WAN024BT6; Start 77; Stop 101
accgtagtttagatatacacattga

SEQ ID NO: 473990 - DNA, 25 bp, Artificial
  probe
  misc_feature (1)..(25): SEQ ID NO: 7658; WAN024BT6; Start 24; Stop 48
cagtaattcattttggcagcgtata

SEQ ID NO: 473991 - DNA, 25 bp, Artificial
  probe
  misc_feature (1)..(25): SEQ ID NO: 7658; WAN024BT6; Start 57; Stop 81
ctccagtcttttcaataaataccgt

SEQ ID NO: 473992 - DNA, 25 bp, Artificial
  probe
  misc_feature (1)..(25): SEQ ID NO: 7658; WAN024BT6; Start 19; Stop 43
attttcagtaattcattttggcagc

SEQ ID NO: 473993 - DNA, 25 bp, Artificial
  probe
  misc_feature (1)..(25): SEQ ID NO: 7658; WAN024BT6; Start 56; Stop 80
tctccagtcttttcaataaataccg

SEQ ID NO: 473994 - DNA, 25 bp, Artificial
  probe
  misc_feature (1)..(25): SEQ ID NO: 7658; WAN024BT6; Start 78; Stop 102
ccgtagtttagatatacacattgaa

SEQ ID NO: 473995 - DNA, 25 bp, Artificial
  probe
  misc_feature (1)..(25): SEQ ID NO: 7658; WAN024BT6; Start 23; Stop 47
tcagtaattcattttggcagcgtat

SEQ ID NO: 473996 - DNA, 25 bp, Artificial
  probe
  misc_feature (1)..(25): SEQ ID NO: 7658; WAN024BT6; Start 20; Stop 44
ttttcagtaattcattttggcagcg

SEQ ID NO: 473997 - DNA, 25 bp, Artificial
  probe
  misc_feature (1)..(25): SEQ ID NO: 7658; WAN024BT6; Start 22; Stop 46
ttcagtaattcattttggcagcgta

SEQ ID NO: 473998 - DNA, 25 bp, Artificial
  probe
  misc_feature (1)..(25): SEQ ID NO: 7658; WAN024BT6; Start 58; Stop 82
tccagtcttttcaataaataccgta

SEQ ID NO: 473999 - DNA, 25 bp, Artificial
  probe
  misc_feature (1)..(25): SEQ ID NO: 7658; WAN024BT6; Start 76; Stop 100
taccgtagtttagatatacacattg

SEQ ID NO: 474000 - DNA, 25 bp, Artificial
  probe
  misc_feature (1)..(25): SEQ ID NO: 7658; WAN024BT6; Start 59; Stop 83
ccagtcttttcaataaataccgtag

SEQ ID NO: 474001 - DNA, 25 bp, Artificial
  probe
  misc_feature (1)..(25): SEQ ID NO: 7658; WAN024BT6; Start 55; Stop 79
gtctccagtcttttcaataaatacc

SEQ ID NO: 474002 - DNA, 25 bp, Artificial
  probe
  misc_feature (1)..(25): SEQ ID NO: 7658; WAN024BT6; Start 21; Stop 45
tttcagtaattcattttggcagcgt

SEQ ID NO: 474003 - DNA, 25 bp, Artificial
  probe
  misc_feature (1)..(25): SEQ ID NO: 7658; WAN024BT6; Start 18; Stop 42
gattttcagtaattcattttggcag

SEQ ID NO: 474004 - DNA, 25 bp, Artificial
  probe
  misc_feature (1)..(25): SEQ ID NO: 7658; WAN024BT6; Start 17; Stop 41
tgattttcagtaattcattttggca

SEQ ID NO: 474005 - DNA, 25 bp, Artificial
  probe
  misc_feature (1)..(25): SEQ ID NO: 7658; WAN024BT6; Start 60; Stop 84
cagtcttttcaataaataccgtagt

SEQ ID NO: 474006 - DNA, 25 bp, Artificial
  probe
  misc_feature (1)..(25): SEQ ID NO: 7658; WAN024BT6; Start 54; Stop 78
tgtctccagtcttttcaataaatac

SEQ ID NO: 474007 - DNA, 25 bp, Artificial
  probe
  misc_feature (1)..(25): SEQ ID NO: 7658; WAN024BT6; Start 29; Stop 53
attcattttggcagcgtatactttt

SEQ ID NO: 474008 - DNA, 25 bp, Artificial
  probe
  misc_feature (1)..(25): SEQ ID NO: 7658; WAN024BT6; Start 28; Stop 52
aattcattttggcagcgtatacttt

SEQ ID NO: 474009 - DNA, 25 bp, Artificial
  probe
  misc_feature (1)..(25): SEQ ID NO: 7658; WAN024BT6; Start 26; Stop 50
gtaattcattttggcagcgtatact

SEQ ID NO: 474010 - DNA, 25 bp, Artificial
  probe
  misc_feature (1)..(25): SEQ ID NO: 7658; WAN024BT6; Start 25; Stop 49
agtaattcattttggcagcgtatac

SEQ ID NO: 474011 - DNA, 25 bp, Artificial
  probe
  misc_feature (1)..(25): SEQ ID NO: 7658; WAN024BT6; Start 27; Stop 51
taattcattttggcagcgtatactt

SEQ ID NO: 474012 - DNA, 25 bp, Artificial
  probe
  misc_feature (1)..(25): SEQ ID NO: 7658; WAN024BT6; Start 51; Stop 75
ttttgtctccagtcttttcaataaa

SEQ ID NO: 474013 - DNA, 25 bp, Artificial
  probe
  misc_feature (1)..(25): SEQ ID NO: 7658; WAN024BT6; Start 16; Stop 40
ttgattttcagtaattcattttggc

SEQ ID NO: 474014 - DNA, 25 bp, Artificial
  probe
  misc_feature (1)..(25): SEQ ID NO: 7658; WAN024BT6; Start 52; Stop 76
tttgtctccagtcttttcaataaat

SEQ ID NO: 474015 - DNA, 25 bp, Artificial
  probe
  misc_feature (1)..(25): SEQ ID NO: 7658; WAN024BT6; Start 73; Stop 97
aaataccgtagtttagatatacaca

SEQ ID NO: 474016 - DNA, 25 bp, Artificial
  probe
  misc_feature (1)..(25): SEQ ID NO: 7658; WAN024BT6; Start 75; Stop 99
ataccgtagtttagatatacacatt

SEQ ID NO: 474017 - DNA, 25 bp, Artificial
  probe
  misc_feature (1)..(25): SEQ ID NO: 7658; WAN024BT6; Start 74; Stop 98
aataccgtagtttagatatacacat

SEQ ID NO: 474018 - DNA, 25 bp, Artificial
  probe
  misc_feature (1)..(25): SEQ ID NO: 7658; WAN024BT6; Start 61; Stop 85
agtcttttcaataaataccgtagtt

SEQ ID NO: 474019 - DNA, 25 bp, Artificial
  probe
  misc_feature (1)..(25): SEQ ID NO: 7658; WAN024BT6; Start 79; Stop 103
cgtagtttagatatacacattgaaa

SEQ ID NO: 474020 - DNA, 25 bp, Artificial
  probe
  misc_feature (1)..(25): SEQ ID NO: 7658; WAN024BT6; Start 53; Stop 77
ttgtctccagtcttttcaataaata

SEQ ID NO: 474021 - DNA, 25 bp, Artificial
  probe
  misc_feature (1)..(25): SEQ ID NO: 7658; WAN024BT6; Start 62; Stop 86
gtcttttcaataaataccgtagttt

SEQ ID NO: 474022 - DNA, 25 bp, Artificial
  probe
  misc_feature (1)..(25): SEQ ID NO: 7658; WAN024BT6; Start 15; Stop 39
tttgattttcagtaattcattttgg

SEQ ID NO: 474023 - DNA, 25 bp, Artificial
  probe
  misc_feature (1)..(25): SEQ ID NO: 7659; WAN024B77; Start 99; Stop 123
cttaccaacattaaccataccatcg

SEQ ID NO: 474024 - DNA, 25 bp, Artificial
  probe
  misc_feature (1)..(25): SEQ ID NO: 7659; WAN024B77; Start 100; Stop 124
ttaccaacattaaccataccatcgg

SEQ ID NO: 474025 - DNA, 25 bp, Artificial
  probe
  misc_feature (1)..(25): SEQ ID NO: 7659; WAN024B77; Start 98; Stop 122
tcttaccaacattaaccataccatc

SEQ ID NO: 474026 - DNA, 25 bp, Artificial
  probe
  misc_feature (1)..(25): SEQ ID NO: 7659; WAN024B77; Start 97; Stop 121
ttcttaccaacattaaccataccat

SEQ ID NO: 474027 - DNA, 25 bp, Artificial
  probe
  misc_feature (1)..(25): SEQ ID NO: 7659; WAN024B77; Start 27; Stop 51
gttaattgctccaatgacttacgaa

SEQ ID NO: 474028 - DNA, 25 bp, Artificial
  probe
  misc_feature (1)..(25): SEQ ID NO: 7659; WAN024B77; Start 29; Stop 53
taattgctccaatgacttacgaaga

SEQ ID NO: 474029 - DNA, 25 bp, Artificial
  probe
  misc_feature (1)..(25): SEQ ID NO: 7659; WAN024B77; Start 28; Stop 52
ttaattgctccaatgacttacgaag

SEQ ID NO: 474030 - DNA, 25 bp, Artificial
  probe
  misc_feature (1)..(25): SEQ ID NO: 7659; WAN024B77; Start 25; Stop 49
gagttaattgctccaatgacttacg

SEQ ID NO: 474031 - DNA, 25 bp, Artificial
  probe
  misc_feature (1)..(25): SEQ ID NO: 7659; WAN024B77; Start 26; Stop 50
agttaattgctccaatgacttacga

SEQ ID NO: 474032 - DNA, 25 bp, Artificial
  probe
  misc_feature (1)..(25): SEQ ID NO: 7659; WAN024B77; Start 24; Stop 48
tgagttaattgctccaatgacttac

SEQ ID NO: 474033 - DNA, 25 bp, Artificial
  probe
  misc_feature (1)..(25): SEQ ID NO: 7659; WAN024B77; Start 23; Stop 47
gtgagttaattgctccaatgactta

SEQ ID NO: 474034 - DNA, 25 bp, Artificial
  probe
  misc_feature (1)..(25): SEQ ID NO: 7659; WAN024B77; Start 101; Stop 125
taccaacattaaccataccatcggt

SEQ ID NO: 474035 - DNA, 25 bp, Artificial
  probe
  misc_feature (1)..(25): SEQ ID NO: 7659; WAN024B77; Start 19; Stop 43
aatggtgagttaattgctccaatga

SEQ ID NO: 474036 - DNA, 25 bp, Artificial
  probe
  misc_feature (1)..(25): SEQ ID NO: 7659; WAN024B77; Start 32; Stop 56
ttgctccaatgacttacgaagagac

SEQ ID NO: 474037 - DNA, 25 bp, Artificial
  probe
  misc_feature (1)..(25): SEQ ID NO: 7659; WAN024B77; Start 30; Stop 54
aattgctccaatgacttacgaagag

SEQ ID NO: 474038 - DNA, 25 bp, Artificial
  probe
  misc_feature (1)..(25): SEQ ID NO: 7659; WAN024B77; Start 96; Stop 120
tttcttaccaacattaaccatacca

SEQ ID NO: 474039 - DNA, 25 bp, Artificial
  probe
  misc_feature (1)..(25): SEQ ID NO: 7659; WAN024B77; Start 22; Stop 46
ggtgagttaattgctccaatgactt

SEQ ID NO: 474040 - DNA, 25 bp, Artificial
  probe
  misc_feature (1)..(25): SEQ ID NO: 7659; WAN024B77; Start 20; Stop 44
atggtgagttaattgctccaatgac

SEQ ID NO: 474041 - DNA, 25 bp, Artificial
  probe
  misc_feature (1)..(25): SEQ ID NO: 7659; WAN024B77; Start 31; Stop 55
attgctccaatgacttacgaagaga

SEQ ID NO: 474042 - DNA, 25 bp, Artificial
  probe
  misc_feature (1)..(25): SEQ ID NO: 7659; WAN024B77; Start 14; Stop 38
taacaaatggtgagttaattgctcc

SEQ ID NO: 474043 - DNA, 25 bp, Artificial
  probe
  misc_feature (1)..(25): SEQ ID NO: 7659; WAN024B77; Start 12; Stop 36
gctaacaaatggtgagttaattgct

SEQ ID NO: 474044 - DNA, 25 bp, Artificial
  probe
  misc_feature (1)..(25): SEQ ID NO: 7659; WAN024B77; Start 10; Stop 34
gggctaacaaatggtgagttaattg

SEQ ID NO: 474045 - DNA, 25 bp, Artificial
  probe
  misc_feature (1)..(25): SEQ ID NO: 7659; WAN024B77; Start 9; Stop 33
agggctaacaaatggtgagttaatt

SEQ ID NO: 474046 - DNA, 25 bp, Artificial
  probe
  misc_feature (1)..(25): SEQ ID NO: 7659; WAN024B77; Start 21; Stop 45
tggtgagttaattgctccaatgact

SEQ ID NO: 474047 - DNA, 25 bp, Artificial
  probe
  misc_feature (1)..(25): SEQ ID NO: 7659; WAN024B77; Start 11; Stop 35
ggctaacaaatggtgagttaattgc

SEQ ID NO: 474048 - DNA, 25 bp, Artificial
  probe
  misc_feature (1)..(25): SEQ ID NO: 7659; WAN024B77; Start 8; Stop 32
cagggctaacaaatggtgagttaat

SEQ ID NO: 474049 - DNA, 25 bp, Artificial
  probe
  misc_feature (1)..(25): SEQ ID NO: 7659; WAN024B77; Start 13; Stop 37
ctaacaaatggtgagttaattgctc

SEQ ID NO: 474050 - DNA, 25 bp, Artificial
  probe
  misc_feature (1)..(25): SEQ ID NO: 7659; WAN024B77; Start 16; Stop 40
acaaatggtgagttaattgctccaa

SEQ ID NO: 474051 - DNA, 25 bp, Artificial
  probe
  misc_feature (1)..(25): SEQ ID NO: 7659; WAN024B77; Start 15; Stop 39
aacaaatggtgagttaattgctcca

SEQ ID NO: 474052 - DNA, 25 bp, Artificial
  probe
  misc_feature (1)..(25): SEQ ID NO: 7659; WAN024B77; Start 112; Stop 136
accataccatcggttattatagtaa

SEQ ID NO: 474053 - DNA, 25 bp, Artificial
  probe
  misc_feature (1)..(25): SEQ ID NO: 7659; WAN024B77; Start 18; Stop 42
aaatggtgagttaattgctccaatg

SEQ ID NO: 474054 - DNA, 25 bp, Artificial
  probe
  misc_feature (1)..(25): SEQ ID NO: 7659; WAN024B77; Start 17; Stop 41
caaatggtgagttaattgctccaat

SEQ ID NO: 474055 - DNA, 25 bp, Artificial
  probe
  misc_feature (1)..(25): SEQ ID NO: 7659; WAN024B77; Start 33; Stop 57
tgctccaatgacttacgaagagacg

SEQ ID NO: 474056 - DNA, 25 bp, Artificial
  probe
  misc_feature (1)..(25): SEQ ID NO: 7661; WAN024DMY; Start 112; Stop 136
cttgactctaccttgcttgctatca

SEQ ID NO: 474057 - DNA, 25 bp, Artificial
  probe
  misc_feature (1)..(25): SEQ ID NO: 7661; WAN024DMY; Start 50; Stop 74
gatttattacagccaagcatctcaa

SEQ ID NO: 474058 - DNA, 25 bp, Artificial
  probe
  misc_feature (1)..(25): SEQ ID NO: 7661; WAN024DMY; Start 51; Stop 75
atttattacagccaagcatctcaaa

SEQ ID NO: 474059 - DNA, 25 bp, Artificial
  probe
  misc_feature (1)..(25): SEQ ID NO: 7661; WAN024DMY; Start 111; Stop 135
ccttgactctaccttgcttgctatc

SEQ ID NO: 474060 - DNA, 25 bp, Artificial
  probe
  misc_feature (1)..(25): SEQ ID NO: 7661; WAN024DMY; Start 224; Stop 248
taggcattggtaaattcttcacact

SEQ ID NO: 474061 - DNA, 25 bp, Artificial
  probe
  misc_feature (1)..(25): SEQ ID NO: 7661; WAN024DMY; Start 223; Stop 247
ataggcattggtaaattcttcacac

SEQ ID NO: 474062 - DNA, 25 bp, Artificial
  probe
  misc_feature (1)..(25): SEQ ID NO: 7661; WAN024DMY; Start 150; Stop 174
cccacagataaacaattcggaaata

SEQ ID NO: 474063 - DNA, 25 bp, Artificial
  probe
  misc_feature (1)..(25): SEQ ID NO: 7661; WAN024DMY; Start 38; Stop 62
tagtattcggcagatttattacagc

SEQ ID NO: 474064 - DNA, 25 bp, Artificial
  probe
  misc_feature (1)..(25): SEQ ID NO: 7661; WAN024DMY; Start 159; Stop 183
aaacaattcggaaataggtctcatt

SEQ ID NO: 474065 - DNA, 25 bp, Artificial
  probe
  misc_feature (1)..(25): SEQ ID NO: 7661; WAN024DMY; Start 222; Stop 246
aataggcattggtaaattcttcaca

SEQ ID NO: 474066 - DNA, 25 bp, Artificial
  probe
  misc_feature (1)..(25): SEQ ID NO: 7661; WAN024DMY; Start 227; Stop 251
gcattggtaaattcttcacactcaa

SEQ ID NO: 474067 - DNA, 25 bp, Artificial
  probe
  misc_feature (1)..(25): SEQ ID NO: 7661; WAN024DMY; Start 110; Stop 134
tccttgactctaccttgcttgctat

SEQ ID NO: 474068 - DNA, 25 bp, Artificial
  probe
  misc_feature (1)..(25): SEQ ID NO: 7661; WAN024DMY; Start 225; Stop 249
aggcattggtaaattcttcacactc

SEQ ID NO: 474069 - DNA, 25 bp, Artificial
  probe
  misc_feature (1)..(25): SEQ ID NO: 7661; WAN024DMY; Start 153; Stop 177
acagataaacaattcggaaataggt

SEQ ID NO: 474070 - DNA, 25 bp, Artificial
  probe
  misc_feature (1)..(25): SEQ ID NO: 7661; WAN024DMY; Start 8; Stop 32
gcagatattcaagaatcgggagttt

SEQ ID NO: 474071 - DNA, 25 bp, Artificial
  probe
  misc_feature (1)..(25): SEQ ID NO: 7661; WAN024DMY; Start 226; Stop 250
ggcattggtaaattcttcacactca

SEQ ID NO: 474072 - DNA, 25 bp, Artificial
  probe
  misc_feature (1)..(25): SEQ ID NO: 7661; WAN024DMY; Start 158; Stop 182
taaacaattcggaaataggtctcat

SEQ ID NO: 474073 - DNA, 25 bp, Artificial
  probe
  misc_feature (1)..(25): SEQ ID NO: 7661; WAN024DMY; Start 157; Stop 181
ataaacaattcggaaataggtctca

SEQ ID NO: 474074 - DNA, 25 bp, Artificial
  probe
  misc_feature (1)..(25): SEQ ID NO: 7661; WAN024DMY; Start 152; Stop 176
cacagataaacaattcggaaatagg

SEQ ID NO: 474075 - DNA, 25 bp, Artificial
  probe
  misc_feature (1)..(25): SEQ ID NO: 7661; WAN024DMY; Start 151; Stop 175
ccacagataaacaattcggaaatag

SEQ ID NO: 474076 - DNA, 25 bp, Artificial
  probe
  misc_feature (1)..(25): SEQ ID NO: 7661; WAN024DMY; Start 109; Stop 133
ttccttgactctaccttgcttgcta

SEQ ID NO: 474077 - DNA, 25 bp, Artificial
  probe
  misc_feature (1)..(25): SEQ ID NO: 7661; WAN024DMY; Start 154; Stop 178
cagataaacaattcggaaataggtc

SEQ ID NO: 474078 - DNA, 25 bp, Artificial
  probe
  misc_feature (1)..(25): SEQ ID NO: 7661; WAN024DMY; Start 231; Stop 255
tggtaaattcttcacactcaatact

SEQ ID NO: 474079 - DNA, 25 bp, Artificial
  probe
  misc_feature (1)..(25): SEQ ID NO: 7661; WAN024DMY; Start 160; Stop 184
aacaattcggaaataggtctcattt

SEQ ID NO: 474080 - DNA, 25 bp, Artificial
  probe
  misc_feature (1)..(25): SEQ ID NO: 7661; WAN024DMY; Start 156; Stop 180
gataaacaattcggaaataggtctc

SEQ ID NO: 474081 - DNA, 25 bp, Artificial
  probe
  misc_feature (1)..(25): SEQ ID NO: 7661; WAN024DMY; Start 149; Stop 173
gcccacagataaacaattcggaaat

SEQ ID NO: 474082 - DNA, 25 bp, Artificial
  probe
  misc_feature (1)..(25): SEQ ID NO: 7661; WAN024DMY; Start 155; Stop 179
agataaacaattcggaaataggtct

SEQ ID NO: 474083 - DNA, 25 bp, Artificial
  probe
  misc_feature (1)..(25): SEQ ID NO: 7661; WAN024DMY; Start 186; Stop 210
ccttgtagaaatgctcttcgataac

SEQ ID NO: 474084 - DNA, 25 bp, Artificial
  probe
  misc_feature (1)..(25): SEQ ID NO: 7661; WAN024DMY; Start 185; Stop 209
tccttgtagaaatgctcttcgataa

SEQ ID NO: 474085 - DNA, 25 bp, Artificial
  probe
  misc_feature (1)..(25): SEQ ID NO: 7661; WAN024DMY; Start 184; Stop 208
ttccttgtagaaatgctcttcgata

SEQ ID NO: 474086 - DNA, 25 bp, Artificial
  probe
  misc_feature (1)..(25): SEQ ID NO: 7661; WAN024DMY; Start 221; Stop 245
taataggcattggtaaattcttcac

SEQ ID NO: 474087 - DNA, 25 bp, Artificial
  probe
  misc_feature (1)..(25): SEQ ID NO: 7661; WAN024DMY; Start 195; Stop 219
aatgctcttcgataacacgtttaaa

SEQ ID NO: 474088 - DNA, 25 bp, Artificial
  probe
  misc_feature (1)..(25): SEQ ID NO: 7661; WAN024DMY; Start 194; Stop 218
aaatgctcttcgataacacgtttaa

SEQ ID NO: 474089 - DNA, 25 bp, Artificial
  probe
  misc_feature (1)..(25): SEQ ID NO: 7662; WAN024AV9; Start 305; Stop 329
attatctcttcaaggtcattccaga

SEQ ID NO: 474090 - DNA, 25 bp, Artificial
  probe
  misc_feature (1)..(25): SEQ ID NO: 7662; WAN024AV9; Start 306; Stop 330
ttatctcttcaaggtcattccagac

SEQ ID NO: 474091 - DNA, 25 bp, Artificial
  probe
  misc_feature (1)..(25): SEQ ID NO: 7662; WAN024AV9; Start 304; Stop 328
tattatctcttcaaggtcattccag

SEQ ID NO: 474092 - DNA, 25 bp, Artificial
  probe
  misc_feature (1)..(25): SEQ ID NO: 7662; WAN024AV9; Start 307; Stop 331
tatctcttcaaggtcattccagaca

SEQ ID NO: 474093 - DNA, 25 bp, Artificial
  probe
  misc_feature (1)..(25): SEQ ID NO: 7662; WAN024AV9; Start 308; Stop 332
atctcttcaaggtcattccagacaa

SEQ ID NO: 474094 - DNA, 25 bp, Artificial
  probe
  misc_feature (1)..(25): SEQ ID NO: 7662; WAN024AV9; Start 303; Stop 327
ttattatctcttcaaggtcattcca

SEQ ID NO: 474095 - DNA, 25 bp, Artificial
  probe
  misc_feature (1)..(25): SEQ ID NO: 7662; WAN024AV9; Start 299; Stop 323
tcacttattatctcttcaaggtcat

SEQ ID NO: 474096 - DNA, 25 bp, Artificial
  probe
  misc_feature (1)..(25): SEQ ID NO: 7662; WAN024AV9; Start 298; Stop 322
atcacttattatctcttcaaggtca

SEQ ID NO: 474097 - DNA, 25 bp, Artificial
  probe
  misc_feature (1)..(25): SEQ ID NO: 7662; WAN024AV9; Start 302; Stop 326
cttattatctcttcaaggtcattcc

SEQ ID NO: 474098 - DNA, 25 bp, Artificial
  probe
  misc_feature (1)..(25): SEQ ID NO: 7662; WAN024AV9; Start 282; Stop 306
tgctttgaccatctttatcacttat

SEQ ID NO: 474099 - DNA, 25 bp, Artificial
  probe
  misc_feature (1)..(25): SEQ ID NO: 7662; WAN024AV9; Start 300; Stop 324
cacttattatctcttcaaggtcatt

SEQ ID NO: 474100 - DNA, 25 bp, Artificial
  probe
  misc_feature (1)..(25): SEQ ID NO: 7662; WAN024AV9; Start 312; Stop 336
cttcaaggtcattccagacaaagaa

SEQ ID NO: 474101 - DNA, 25 bp, Artificial
  probe
  misc_feature (1)..(25): SEQ ID NO: 7662; WAN024AV9; Start 281; Stop 305
gtgctttgaccatctttatcactta

SEQ ID NO: 474102 - DNA, 25 bp, Artificial
  probe
  misc_feature (1)..(25): SEQ ID NO: 7662; WAN024AV9; Start 301; Stop 325
acttattatctcttcaaggtcattc

SEQ ID NO: 474103 - DNA, 25 bp, Artificial
  probe
  misc_feature (1)..(25): SEQ ID NO: 7662; WAN024AV9; Start 310; Stop 334
ctcttcaaggtcattccagacaaag

SEQ ID NO: 474104 - DNA, 25 bp, Artificial
  probe
  misc_feature (1)..(25): SEQ ID NO: 7662; WAN024AV9; Start 309; Stop 333
tctcttcaaggtcattccagacaaa

SEQ ID NO: 474105 - DNA, 25 bp, Artificial
  probe
  misc_feature (1)..(25): SEQ ID NO: 7662; WAN024AV9; Start 283; Stop 307
gctttgaccatctttatcacttatt

SEQ ID NO: 474106 - DNA, 25 bp, Artificial
  probe
  misc_feature (1)..(25): SEQ ID NO: 7662; WAN024AV9; Start 280; Stop 304
ggtgctttgaccatctttatcactt

SEQ ID NO: 474107 - DNA, 25 bp, Artificial
  probe
  misc_feature (1)..(25): SEQ ID NO: 7662; WAN024AV9; Start 114; Stop 138
cgaagactggctttatcataccaag

SEQ ID NO: 474108 - DNA, 25 bp, Artificial
  probe
  misc_feature (1)..(25): SEQ ID NO: 7662; WAN024AV9; Start 126; Stop 150
ttatcataccaagctctatcaaaca

SEQ ID NO: 474109 - DNA, 25 bp, Artificial
  probe
  misc_feature (1)..(25): SEQ ID NO: 7662; WAN024AV9; Start 240; Stop 264
tatttattttgcccctctcttacca

SEQ ID NO: 474110 - DNA, 25 bp, Artificial
  probe
  misc_feature (1)..(25): SEQ ID NO: 7662; WAN024AV9; Start 241; Stop 265
atttattttgcccctctcttaccag

SEQ ID NO: 474111 - DNA, 25 bp, Artificial
  probe
  misc_feature (1)..(25): SEQ ID NO: 7662; WAN024AV9; Start 297; Stop 321
tatcacttattatctcttcaaggtc

SEQ ID NO: 474112 - DNA, 25 bp, Artificial
  probe
  misc_feature (1)..(25): SEQ ID NO: 7662; WAN024AV9; Start 239; Stop 263
ctatttattttgcccctctcttacc

SEQ ID NO: 474113 - DNA, 25 bp, Artificial
  probe
  misc_feature (1)..(25): SEQ ID NO: 7662; WAN024AV9; Start 129; Stop 153
tcataccaagctctatcaaacatat

SEQ ID NO: 474114 - DNA, 25 bp, Artificial
  probe
  misc_feature (1)..(25): SEQ ID NO: 7662; WAN024AV9; Start 128; Stop 152
atcataccaagctctatcaaacata

SEQ ID NO: 474115 - DNA, 25 bp, Artificial
  probe
  misc_feature (1)..(25): SEQ ID NO: 7662; WAN024AV9; Start 127; Stop 151
tatcataccaagctctatcaaacat

SEQ ID NO: 474116 - DNA, 25 bp, Artificial
  probe
  misc_feature (1)..(25): SEQ ID NO: 7662; WAN024AV9; Start 233; Stop 257
ggatttctatttattttgcccctct

SEQ ID NO: 474117 - DNA, 25 bp, Artificial
  probe
  misc_feature (1)..(25): SEQ ID NO: 7662; WAN024AV9; Start 63; Stop 87
acctttccttttgttgtctattgct

SEQ ID NO: 474118 - DNA, 25 bp, Artificial
  probe
  misc_feature (1)..(25): SEQ ID NO: 7662; WAN024AV9; Start 62; Stop 86
cacctttccttttgttgtctattgc

SEQ ID NO: 474119 - DNA, 25 bp, Artificial
  probe
  misc_feature (1)..(25): SEQ ID NO: 7662; WAN024AV9; Start 90; Stop 114
tttctccagaagttccaagcgattc

SEQ ID NO: 474120 - DNA, 25 bp, Artificial
  probe
  misc_feature (1)..(25): SEQ ID NO: 7662; WAN024AV9; Start 228; Stop 252
gatggggatttctatttattttgcc

SEQ ID NO: 474121 - DNA, 25 bp, Artificial
  probe
  misc_feature (1)..(25): SEQ ID NO: 7662; WAN024AV9; Start 311; Stop 335
tcttcaaggtcattccagacaaaga

SEQ ID NO: 474122 - DNA, 25 bp, Artificial
  probe
  misc_feature (1)..(25): SEQ ID NO: 7663; WAN024F8O; Start 47; Stop 71
taatctaccacactaggaagccgat

SEQ ID NO: 474123 - DNA, 25 bp, Artificial
  probe
  misc_feature (1)..(25): SEQ ID NO: 7663; WAN024F8O; Start 59; Stop 83
ctaggaagccgatccaagaagatag

SEQ ID NO: 474124 - DNA, 25 bp, Artificial
  probe
  misc_feature (1)..(25): SEQ ID NO: 7663; WAN024F8O; Start 46; Stop 70
ctaatctaccacactaggaagccga

SEQ ID NO: 474125 - DNA, 25 bp, Artificial
  probe
  misc_feature (1)..(25): SEQ ID NO: 7663; WAN024F8O; Start 60; Stop 84
taggaagccgatccaagaagataga

SEQ ID NO: 474126 - DNA, 25 bp, Artificial
  probe
  misc_feature (1)..(25): SEQ ID NO: 7663; WAN024F8O; Start 41; Stop 65
ttagcctaatctaccacactaggaa

SEQ ID NO: 474127 - DNA, 25 bp, Artificial
  probe
  misc_feature (1)..(25): SEQ ID NO: 7663; WAN024F8O; Start 42; Stop 66
tagcctaatctaccacactaggaag

SEQ ID NO: 474128 - DNA, 25 bp, Artificial
  probe
  misc_feature (1)..(25): SEQ ID NO: 7663; WAN024F8O; Start 40; Stop 64
attagcctaatctaccacactagga

SEQ ID NO: 474129 - DNA, 25 bp, Artificial
  probe
  misc_feature (1)..(25): SEQ ID NO: 7663; WAN024F8O; Start 58; Stop 82
actaggaagccgatccaagaagata

SEQ ID NO: 474130 - DNA, 25 bp, Artificial
  probe
  misc_feature (1)..(25): SEQ ID NO: 7663; WAN024F8O; Start 39; Stop 63
aattagcctaatctaccacactagg

SEQ ID NO: 474131 - DNA, 25 bp, Artificial
  probe
  misc_feature (1)..(25): SEQ ID NO: 7663; WAN024F8O; Start 48; Stop 72
aatctaccacactaggaagccgatc

SEQ ID NO: 474132 - DNA, 25 bp, Artificial
  probe
  misc_feature (1)..(25): SEQ ID NO: 7663; WAN024F8O; Start 38; Stop 62
aaattagcctaatctaccacactag

SEQ ID NO: 474133 - DNA, 25 bp, Artificial
  probe
  misc_feature (1)..(25): SEQ ID NO: 7663; WAN024F8O; Start 57; Stop 81
cactaggaagccgatccaagaagat

SEQ ID NO: 474134 - DNA, 25 bp, Artificial
  probe
  misc_feature (1)..(25): SEQ ID NO: 7663; WAN024F8O; Start 43; Stop 67
agcctaatctaccacactaggaagc

SEQ ID NO: 474135 - DNA, 25 bp, Artificial
  probe
  misc_feature (1)..(25): SEQ ID NO: 7663; WAN024F8O; Start 45; Stop 69
cctaatctaccacactaggaagccg

SEQ ID NO: 474136 - DNA, 25 bp, Artificial
  probe
  misc_feature (1)..(25): SEQ ID NO: 7663; WAN024F8O; Start 44; Stop 68
gcctaatctaccacactaggaagcc

SEQ ID NO: 474137 - DNA, 25 bp, Artificial
  probe
  misc_feature (1)..(25): SEQ ID NO: 7663; WAN024F8O; Start 37; Stop 61
aaaattagcctaatctaccacacta

SEQ ID NO: 474138 - DNA, 25 bp, Artificial
  probe
  misc_feature (1)..(25): SEQ ID NO: 7663; WAN024F8O; Start 55; Stop 79
cacactaggaagccgatccaagaag

SEQ ID NO: 474139 - DNA, 25 bp, Artificial
  probe
  misc_feature (1)..(25): SEQ ID NO: 7663; WAN024F8O; Start 56; Stop 80
acactaggaagccgatccaagaaga

SEQ ID NO: 474140 - DNA, 25 bp, Artificial
  probe
  misc_feature (1)..(25): SEQ ID NO: 7664; WAN024CBN; Start 121; Stop 145
ttattcactaggacatgcaactcta

SEQ ID NO: 474141 - DNA, 25 bp, Artificial
  probe
  misc_feature (1)..(25): SEQ ID NO: 7664; WAN024CBN; Start 120; Stop 144
gttattcactaggacatgcaactct

SEQ ID NO: 474142 - DNA, 25 bp, Artificial
  probe
  misc_feature (1)..(25): SEQ ID NO: 7664; WAN024CBN; Start 115; Stop 139
agtaagttattcactaggacatgca

SEQ ID NO: 474143 - DNA, 25 bp, Artificial
  probe
  misc_feature (1)..(25): SEQ ID NO: 7664; WAN024CBN; Start 65; Stop 89
aagcaagactcatactaatcacaaa

SEQ ID NO: 474144 - DNA, 25 bp, Artificial
  probe
  misc_feature (1)..(25): SEQ ID NO: 7664; WAN024CBN; Start 64; Stop 88
aaagcaagactcatactaatcacaa

SEQ ID NO: 474145 - DNA, 25 bp, Artificial
  probe
  misc_feature (1)..(25): SEQ ID NO: 7664; WAN024CBN; Start 117; Stop 141
taagttattcactaggacatgcaac

SEQ ID NO: 474146 - DNA, 25 bp, Artificial
  probe
  misc_feature (1)..(25): SEQ ID NO: 7664; WAN024CBN; Start 116; Stop 140
gtaagttattcactaggacatgcaa

SEQ ID NO: 474147 - DNA, 25 bp, Artificial
  probe
  misc_feature (1)..(25): SEQ ID NO: 7664; WAN024CBN; Start 9; Stop 33
atctttcaatgcgtatagtatgtct

SEQ ID NO: 474148 - DNA, 25 bp, Artificial
  probe
  misc_feature (1)..(25): SEQ ID NO: 7664; WAN024CBN; Start 114; Stop 138
tagtaagttattcactaggacatgc

SEQ ID NO: 474149 - DNA, 25 bp, Artificial
  probe
  misc_feature (1)..(25): SEQ ID NO: 7664; WAN024CBN; Start 122; Stop 146
tattcactaggacatgcaactctag

SEQ ID NO: 474150 - DNA, 25 bp, Artificial
  probe
  misc_feature (1)..(25): SEQ ID NO: 7664; WAN024CBN; Start 10; Stop 34
tctttcaatgcgtatagtatgtcta

SEQ ID NO: 474151 - DNA, 25 bp, Artificial
  probe
  misc_feature (1)..(25): SEQ ID NO: 7664; WAN024CBN; Start 8; Stop 32
aatctttcaatgcgtatagtatgtc

SEQ ID NO: 474152 - DNA, 25 bp, Artificial
  probe
  misc_feature (1)..(25): SEQ ID NO: 7664; WAN024CBN; Start 3; Stop 27
gtacaaatctttcaatgcgtatagt

SEQ ID NO: 474153 - DNA, 25 bp, Artificial
  probe
  misc_feature (1)..(25): SEQ ID NO: 7664; WAN024CBN; Start 11; Stop 35
ctttcaatgcgtatagtatgtctaa

SEQ ID NO: 474154 - DNA, 25 bp, Artificial
  probe
  misc_feature (1)..(25): SEQ ID NO: 7664; WAN024CBN; Start 7; Stop 31
aaatctttcaatgcgtatagtatgt

SEQ ID NO: 474155 - DNA, 25 bp, Artificial
  probe
  misc_feature (1)..(25): SEQ ID NO: 7664; WAN024CBN; Start 5; Stop 29
acaaatctttcaatgcgtatagtat

SEQ ID NO: 474156 - DNA, 25 bp, Artificial
  probe
  misc_feature (1)..(25): SEQ ID NO: 7664; WAN024CBN; Start 118; Stop 142
aagttattcactaggacatgcaact

SEQ ID NO: 474157 - DNA, 25 bp, Artificial
  probe
  misc_feature (1)..(25): SEQ ID NO: 7664; WAN024CBN; Start 119; Stop 143
agttattcactaggacatgcaactc

SEQ ID NO: 474158 - DNA, 25 bp, Artificial
  probe
  misc_feature (1)..(25): SEQ ID NO: 7664; WAN024CBN; Start 6; Stop 30
caaatctttcaatgcgtatagtatg

SEQ ID NO: 474159 - DNA, 25 bp, Artificial
  probe
  misc_feature (1)..(25): SEQ ID NO: 7664; WAN024CBN; Start 78; Stop 102
actaatcacaaaatcaaggggagat

SEQ ID NO: 474160 - DNA, 25 bp, Artificial
  probe
  misc_feature (1)..(25): SEQ ID NO: 7664; WAN024CBN; Start 77; Stop 101
tactaatcacaaaatcaaggggaga

SEQ ID NO: 474161 - DNA, 25 bp, Artificial
  probe
  misc_feature (1)..(25): SEQ ID NO: 7664; WAN024CBN; Start 123; Stop 147
attcactaggacatgcaactctagc

SEQ ID NO: 474162 - DNA, 25 bp, Artificial
  probe
  misc_feature (1)..(25): SEQ ID NO: 7664; WAN024CBN; Start 75; Stop 99
catactaatcacaaaatcaagggga

SEQ ID NO: 474163 - DNA, 25 bp, Artificial
  probe
  misc_feature (1)..(25): SEQ ID NO: 7664; WAN024CBN; Start 74; Stop 98
tcatactaatcacaaaatcaagggg

SEQ ID NO: 474164 - DNA, 25 bp, Artificial
  probe
  misc_feature (1)..(25): SEQ ID NO: 7664; WAN024CBN; Start 12; Stop 36
tttcaatgcgtatagtatgtctaaa

SEQ ID NO: 474165 - DNA, 25 bp, Artificial
  probe
  misc_feature (1)..(25): SEQ ID NO: 7664; WAN024CBN; Start 76; Stop 100
atactaatcacaaaatcaaggggag

SEQ ID NO: 474166 - DNA, 25 bp, Artificial
  probe
  misc_feature (1)..(25): SEQ ID NO: 7664; WAN024CBN; Start 66; Stop 90
agcaagactcatactaatcacaaaa

SEQ ID NO: 474167 - DNA, 25 bp, Artificial
  probe
  misc_feature (1)..(25): SEQ ID NO: 7664; WAN024CBN; Start 63; Stop 87
aaaagcaagactcatactaatcaca

SEQ ID NO: 474168 - DNA, 25 bp, Artificial
  probe
  misc_feature (1)..(25): SEQ ID NO: 7664; WAN024CBN; Start 4; Stop 28
tacaaatctttcaatgcgtatagta

SEQ ID NO: 474169 - DNA, 25 bp, Artificial
  probe
  misc_feature (1)..(25): SEQ ID NO: 7664; WAN024CBN; Start 111; Stop 135
caatagtaagttattcactaggaca

SEQ ID NO: 474170 - DNA, 25 bp, Artificial
  probe
  misc_feature (1)..(25): SEQ ID NO: 7664; WAN024CBN; Start 73; Stop 97
ctcatactaatcacaaaatcaaggg

SEQ ID NO: 474171 - DNA, 25 bp, Artificial
  probe
  misc_feature (1)..(25): SEQ ID NO: 7664; WAN024CBN; Start 67; Stop 91
gcaagactcatactaatcacaaaat

SEQ ID NO: 474172 - DNA, 25 bp, Artificial
  probe
  misc_feature (1)..(25): SEQ ID NO: 7664; WAN024CBN; Start 82; Stop 106
atcacaaaatcaaggggagattcta

SEQ ID NO: 474173 - DNA, 25 bp, Artificial
  probe
  misc_feature (1)..(25): SEQ ID NO: 7665; WAN024CVD; Start 217; Stop 241
attcaatgttgccgaataagtgatt

SEQ ID NO: 474174 - DNA, 25 bp, Artificial
  probe
  misc_feature (1)..(25): SEQ ID NO: 7665; WAN024CVD; Start 216; Stop 240
cattcaatgttgccgaataagtgat

SEQ ID NO: 474175 - DNA, 25 bp, Artificial
  probe
  misc_feature (1)..(25): SEQ ID NO: 7665; WAN024CVD; Start 212; Stop 236
ttgtcattcaatgttgccgaataag

SEQ ID NO: 474176 - DNA, 25 bp, Artificial
  probe
  misc_feature (1)..(25): SEQ ID NO: 7665; WAN024CVD; Start 146; Stop 170
ccgtgatctggattattaccatagt

SEQ ID NO: 474177 - DNA, 25 bp, Artificial
  probe
  misc_feature (1)..(25): SEQ ID NO: 7665; WAN024CVD; Start 11; Stop 35
ttaccagtctgagcattaaccaaat

SEQ ID NO: 474178 - DNA, 25 bp, Artificial
  probe
  misc_feature (1)..(25): SEQ ID NO: 7665; WAN024CVD; Start 215; Stop 239
tcattcaatgttgccgaataagtga

SEQ ID NO: 474179 - DNA, 25 bp, Artificial
  probe
  misc_feature (1)..(25): SEQ ID NO: 7665; WAN024CVD; Start 214; Stop 238
gtcattcaatgttgccgaataagtg

SEQ ID NO: 474180 - DNA, 25 bp, Artificial
  probe
  misc_feature (1)..(25): SEQ ID NO: 7665; WAN024CVD; Start 10; Stop 34
tttaccagtctgagcattaaccaaa

SEQ ID NO: 474181 - DNA, 25 bp, Artificial
  probe
  misc_feature (1)..(25): SEQ ID NO: 7665; WAN024CVD; Start 12; Stop 36
taccagtctgagcattaaccaaatc

SEQ ID NO: 474182 - DNA, 25 bp, Artificial
  probe
  misc_feature (1)..(25): SEQ ID NO: 7665; WAN024CVD; Start 213; Stop 237
tgtcattcaatgttgccgaataagt

SEQ ID NO: 474183 - DNA, 25 bp, Artificial
  probe
  misc_feature (1)..(25): SEQ ID NO: 7665; WAN024CVD; Start 9; Stop 33
ctttaccagtctgagcattaaccaa

SEQ ID NO: 474184 - DNA, 25 bp, Artificial
  probe
  misc_feature (1)..(25): SEQ ID NO: 7665; WAN024CVD; Start 218; Stop 242
ttcaatgttgccgaataagtgattt

SEQ ID NO: 474185 - DNA, 25 bp, Artificial
  probe
  misc_feature (1)..(25): SEQ ID NO: 7665; WAN024CVD; Start 6; Stop 30
caactttaccagtctgagcattaac

SEQ ID NO: 474186 - DNA, 25 bp, Artificial
  probe
  misc_feature (1)..(25): SEQ ID NO: 7665; WAN024CVD; Start 4; Stop 28
tacaactttaccagtctgagcatta

SEQ ID NO: 474187 - DNA, 25 bp, Artificial
  probe
  misc_feature (1)..(25): SEQ ID NO: 7665; WAN024CVD; Start 175; Stop 199
tgttacatcattagattctggtact

SEQ ID NO: 474188 - DNA, 25 bp, Artificial
  probe
  misc_feature (1)..(25): SEQ ID NO: 7665; WAN024CVD; Start 5; Stop 29
acaactttaccagtctgagcattaa

SEQ ID NO: 474189 - DNA, 25 bp, Artificial
  probe
  misc_feature (1)..(25): SEQ ID NO: 7665; WAN024CVD; Start 147; Stop 171
cgtgatctggattattaccatagtt

SEQ ID NO: 474190 - DNA, 25 bp, Artificial
  probe
  misc_feature (1)..(25): SEQ ID NO: 7665; WAN024CVD; Start 7; Stop 31
aactttaccagtctgagcattaacc

SEQ ID NO: 474191 - DNA, 25 bp, Artificial
  probe
  misc_feature (1)..(25): SEQ ID NO: 7665; WAN024CVD; Start 3; Stop 27
gtacaactttaccagtctgagcatt

SEQ ID NO: 474192 - DNA, 25 bp, Artificial
  probe
  misc_feature (1)..(25): SEQ ID NO: 7665; WAN024CVD; Start 8; Stop 32
actttaccagtctgagcattaacca

SEQ ID NO: 474193 - DNA, 25 bp, Artificial
  probe
  misc_feature (1)..(25): SEQ ID NO: 7665; WAN024CVD; Start 188; Stop 212
gattctggtacttctacaattgctt

SEQ ID NO: 474194 - DNA, 25 bp, Artificial
  probe
  misc_feature (1)..(25): SEQ ID NO: 7665; WAN024CVD; Start 178; Stop 202
tacatcattagattctggtacttct

SEQ ID NO: 474195 - DNA, 25 bp, Artificial
  probe
  misc_feature (1)..(25): SEQ ID NO: 7665; WAN024CVD; Start 187; Stop 211
agattctggtacttctacaattgct

SEQ ID NO: 474196 - DNA, 25 bp, Artificial
  probe
  misc_feature (1)..(25): SEQ ID NO: 7665; WAN024CVD; Start 138; Stop 162
gagtattcccgtgatctggattatt

SEQ ID NO: 474197 - DNA, 25 bp, Artificial
  probe
  misc_feature (1)..(25): SEQ ID NO: 7665; WAN024CVD; Start 211; Stop 235
tttgtcattcaatgttgccgaataa

SEQ ID NO: 474198 - DNA, 25 bp, Artificial
  probe
  misc_feature (1)..(25): SEQ ID NO: 7665; WAN024CVD; Start 141; Stop 165
tattcccgtgatctggattattacc

SEQ ID NO: 474199 - DNA, 25 bp, Artificial
  probe
  misc_feature (1)..(25): SEQ ID NO: 7665; WAN024CVD; Start 120; Stop 144
ttggcttattcggctttggagtatt

SEQ ID NO: 474200 - DNA, 25 bp, Artificial
  probe
  misc_feature (1)..(25): SEQ ID NO: 7665; WAN024CVD; Start 119; Stop 143
tttggcttattcggctttggagtat

SEQ ID NO: 474201 - DNA, 25 bp, Artificial
  probe
  misc_feature (1)..(25): SEQ ID NO: 7665; WAN024CVD; Start 118; Stop 142
atttggcttattcggctttggagta

SEQ ID NO: 474202 - DNA, 25 bp, Artificial
  probe
  misc_feature (1)..(25): SEQ ID NO: 7665; WAN024CVD; Start 210; Stop 234
ctttgtcattcaatgttgccgaata

SEQ ID NO: 474203 - DNA, 25 bp, Artificial
  probe
  misc_feature (1)..(25): SEQ ID NO: 7665; WAN024CVD; Start 174; Stop 198
atgttacatcattagattctggtac

SEQ ID NO: 474204 - DNA, 25 bp, Artificial
  probe
  misc_feature (1)..(25): SEQ ID NO: 7665; WAN024CVD; Start 176; Stop 200
gttacatcattagattctggtactt

SEQ ID NO: 474205 - DNA, 25 bp, Artificial
  probe
  misc_feature (1)..(25): SEQ ID NO: 7665; WAN024CVD; Start 114; Stop 138
tttcatttggcttattcggctttgg

SEQ ID NO: 474206 - DNA, 25 bp, Artificial
  probe
  misc_feature (1)..(25): SEQ ID NO: 7666; WAN024CF3; Start 4; Stop 28
tacaaggtggaagcgatcaataatg

SEQ ID NO: 474207 - DNA, 25 bp, Artificial
  probe
  misc_feature (1)..(25): SEQ ID NO: 7666; WAN024CF3; Start 3; Stop 27
gtacaaggtggaagcgatcaataat

SEQ ID NO: 474208 - DNA, 25 bp, Artificial
  probe
  misc_feature (1)..(25): SEQ ID NO: 7666; WAN024CF3; Start 5; Stop 29
acaaggtggaagcgatcaataatga

SEQ ID NO: 474209 - DNA, 25 bp, Artificial
  probe
  misc_feature (1)..(25): SEQ ID NO: 7666; WAN024CF3; Start 8; Stop 32
aggtggaagcgatcaataatgatat

SEQ ID NO: 474210 - DNA, 25 bp, Artificial
  probe
  misc_feature (1)..(25): SEQ ID NO: 7666; WAN024CF3; Start 7; Stop 31
aaggtggaagcgatcaataatgata

SEQ ID NO: 474211 - DNA, 25 bp, Artificial
  probe
  misc_feature (1)..(25): SEQ ID NO: 7666; WAN024CF3; Start 9; Stop 33
ggtggaagcgatcaataatgatatt

SEQ ID NO: 474212 - DNA, 25 bp, Artificial
  probe
  misc_feature (1)..(25): SEQ ID NO: 7666; WAN024CF3; Start 6; Stop 30
caaggtggaagcgatcaataatgat

SEQ ID NO: 474213 - DNA, 25 bp, Artificial
  probe
  misc_feature (1)..(25): SEQ ID NO: 7666; WAN024CF3; Start 13; Stop 37
gaagcgatcaataatgatattggca

SEQ ID NO: 474214 - DNA, 25 bp, Artificial
  probe
  misc_feature (1)..(25): SEQ ID NO: 7666; WAN024CF3; Start 12; Stop 36
ggaagcgatcaataatgatattggc

SEQ ID NO: 474215 - DNA, 25 bp, Artificial
  probe
  misc_feature (1)..(25): SEQ ID NO: 7666; WAN024CF3; Start 15; Stop 39
agcgatcaataatgatattggcatt

SEQ ID NO: 474216 - DNA, 25 bp, Artificial
  probe
  misc_feature (1)..(25): SEQ ID NO: 7666; WAN024CF3; Start 14; Stop 38
aagcgatcaataatgatattggcat

SEQ ID NO: 474217 - DNA, 25 bp, Artificial
  probe
  misc_feature (1)..(25): SEQ ID NO: 7666; WAN024CF3; Start 11; Stop 35
tggaagcgatcaataatgatattgg

SEQ ID NO: 474218 - DNA, 25 bp, Artificial
  probe
  misc_feature (1)..(25): SEQ ID NO: 7666; WAN024CF3; Start 39; Stop 63
tagggaaaaggcgatagataaaact

SEQ ID NO: 474219 - DNA, 25 bp, Artificial
  probe
  misc_feature (1)..(25): SEQ ID NO: 7666; WAN024CF3; Start 35; Stop 59
gcattagggaaaaggcgatagataa

SEQ ID NO: 474220 - DNA, 25 bp, Artificial
  probe
  misc_feature (1)..(25): SEQ ID NO: 7666; WAN024CF3; Start 40; Stop 64
agggaaaaggcgatagataaaactt

SEQ ID NO: 474221 - DNA, 25 bp, Artificial
  probe
  misc_feature (1)..(25): SEQ ID NO: 7666; WAN024CF3; Start 38; Stop 62
ttagggaaaaggcgatagataaaac

SEQ ID NO: 474222 - DNA, 25 bp, Artificial
  probe
  misc_feature (1)..(25): SEQ ID NO: 7666; WAN024CF3; Start 2; Stop 26
tgtacaaggtggaagcgatcaataa

SEQ ID NO: 474223 - DNA, 25 bp, Artificial
  probe
  misc_feature (1)..(25): SEQ ID NO: 7666; WAN024CF3; Start 36; Stop 60
cattagggaaaaggcgatagataaa

SEQ ID NO: 474224 - DNA, 25 bp, Artificial
  probe
  misc_feature (1)..(25): SEQ ID NO: 7666; WAN024CF3; Start 10; Stop 34
gtggaagcgatcaataatgatattg

SEQ ID NO: 474225 - DNA, 25 bp, Artificial
  probe
  misc_feature (1)..(25): SEQ ID NO: 7666; WAN024CF3; Start 26; Stop 50
atgatattggcattagggaaaaggc

SEQ ID NO: 474226 - DNA, 25 bp, Artificial
  probe
  misc_feature (1)..(25): SEQ ID NO: 7666; WAN024CF3; Start 16; Stop 40
gcgatcaataatgatattggcatta

SEQ ID NO: 474227 - DNA, 25 bp, Artificial
  probe
  misc_feature (1)..(25): SEQ ID NO: 7666; WAN024CF3; Start 37; Stop 61
attagggaaaaggcgatagataaaa

SEQ ID NO: 474228 - DNA, 25 bp, Artificial
  probe
  misc_feature (1)..(25): SEQ ID NO: 7666; WAN024CF3; Start 30; Stop 54
tattggcattagggaaaaggcgata

SEQ ID NO: 474229 - DNA, 25 bp, Artificial
  probe
  misc_feature (1)..(25): SEQ ID NO: 7666; WAN024CF3; Start 34; Stop 58
ggcattagggaaaaggcgatagata

SEQ ID NO: 474230 - DNA, 25 bp, Artificial
  probe
  misc_feature (1)..(25): SEQ ID NO: 7666; WAN024CF3; Start 29; Stop 53
atattggcattagggaaaaggcgat

SEQ ID NO: 474231 - DNA, 25 bp, Artificial
  probe
  misc_feature (1)..(25): SEQ ID NO: 7666; WAN024CF3; Start 41; Stop 65
gggaaaaggcgatagataaaacttt

SEQ ID NO: 474232 - DNA, 25 bp, Artificial
  probe
  misc_feature (1)..(25): SEQ ID NO: 7666; WAN024CF3; Start 25; Stop 49
aatgatattggcattagggaaaagg

SEQ ID NO: 474233 - DNA, 25 bp, Artificial
  probe
  misc_feature (1)..(25): SEQ ID NO: 7666; WAN024CF3; Start 31; Stop 55
attggcattagggaaaaggcgatag

SEQ ID NO: 474234 - DNA, 25 bp, Artificial
  probe
  misc_feature (1)..(25): SEQ ID NO: 7666; WAN024CF3; Start 42; Stop 66
ggaaaaggcgatagataaaactttg

SEQ ID NO: 474235 - DNA, 25 bp, Artificial
  probe
  misc_feature (1)..(25): SEQ ID NO: 7666; WAN024CF3; Start 28; Stop 52
gatattggcattagggaaaaggcga

SEQ ID NO: 474236 - DNA, 25 bp, Artificial
  probe
  misc_feature (1)..(25): SEQ ID NO: 7666; WAN024CF3; Start 27; Stop 51
tgatattggcattagggaaaaggcg

SEQ ID NO: 474237 - DNA, 25 bp, Artificial
  probe
  misc_feature (1)..(25): SEQ ID NO: 7666; WAN024CF3; Start 20; Stop 44
tcaataatgatattggcattaggga

SEQ ID NO: 474238 - DNA, 25 bp, Artificial
  probe
  misc_feature (1)..(25): SEQ ID NO: 7666; WAN024CF3; Start 48; Stop 72
ggcgatagataaaactttgatattg

SEQ ID NO: 474239 - DNA, 25 bp, Artificial
  probe
  misc_feature (1)..(25): SEQ ID NO: 7667; WAN024BJX; Start 52; Stop 76
aggattatttcaagtttcgaacaac

SEQ ID NO: 474240 - DNA, 25 bp, Artificial
  probe
  misc_feature (1)..(25): SEQ ID NO: 7667; WAN024BJX; Start 68; Stop 92
tcgaacaacttttacaagattttct

SEQ ID NO: 474241 - DNA, 25 bp, Artificial
  probe
  misc_feature (1)..(25): SEQ ID NO: 7667; WAN024BJX; Start 69; Stop 93
cgaacaacttttacaagattttcta

SEQ ID NO: 474242 - DNA, 25 bp, Artificial
  probe
  misc_feature (1)..(25): SEQ ID NO: 7667; WAN024BJX; Start 72; Stop 96
acaacttttacaagattttctacag

SEQ ID NO: 474243 - DNA, 25 bp, Artificial
  probe
  misc_feature (1)..(25): SEQ ID NO: 7667; WAN024BJX; Start 51; Stop 75
taggattatttcaagtttcgaacaa

SEQ ID NO: 474244 - DNA, 25 bp, Artificial
  probe
  misc_feature (1)..(25): SEQ ID NO: 7667; WAN024BJX; Start 50; Stop 74
ttaggattatttcaagtttcgaaca

SEQ ID NO: 474245 - DNA, 25 bp, Artificial
  probe
  misc_feature (1)..(25): SEQ ID NO: 7667; WAN024BJX; Start 71; Stop 95
aacaacttttacaagattttctaca

SEQ ID NO: 474246 - DNA, 25 bp, Artificial
  probe
  misc_feature (1)..(25): SEQ ID NO: 7667; WAN024BJX; Start 53; Stop 77
ggattatttcaagtttcgaacaact

SEQ ID NO: 474247 - DNA, 25 bp, Artificial
  probe
  misc_feature (1)..(25): SEQ ID NO: 7667; WAN024BJX; Start 49; Stop 73
tttaggattatttcaagtttcgaac

SEQ ID NO: 474248 - DNA, 25 bp, Artificial
  probe
  misc_feature (1)..(25): SEQ ID NO: 7667; WAN024BJX; Start 70; Stop 94
gaacaacttttacaagattttctac

SEQ ID NO: 474249 - DNA, 25 bp, Artificial
  probe
  misc_feature (1)..(25): SEQ ID NO: 7667; WAN024BJX; Start 65; Stop 89
gtttcgaacaacttttacaagattt

SEQ ID NO: 474250 - DNA, 25 bp, Artificial
  probe
  misc_feature (1)..(25): SEQ ID NO: 7667; WAN024BJX; Start 67; Stop 91
ttcgaacaacttttacaagattttc

SEQ ID NO: 474251 - DNA, 25 bp, Artificial
  probe
  misc_feature (1)..(25): SEQ ID NO: 7667; WAN024BJX; Start 66; Stop 90
tttcgaacaacttttacaagatttt

SEQ ID NO: 474252 - DNA, 25 bp, Artificial
  probe
  misc_feature (1)..(25): SEQ ID NO: 7667; WAN024BJX; Start 2; Stop 26
tgtaccttacttttctggtaagaaa

SEQ ID NO: 474253 - DNA, 25 bp, Artificial
  probe
  misc_feature (1)..(25): SEQ ID NO: 7667; WAN024BJX; Start 1; Stop 25
ttgtaccttacttttctggtaagaa

SEQ ID NO: 474254 - DNA, 25 bp, Artificial
  probe
  misc_feature (1)..(25): SEQ ID NO: 7667; WAN024BJX; Start 64; Stop 88
agtttcgaacaacttttacaagatt

SEQ ID NO: 474255 - DNA, 25 bp, Artificial
  probe
  misc_feature (1)..(25): SEQ ID NO: 7667; WAN024BJX; Start 26; Stop 50
aaaccagagcttacgccctgatttt

SEQ ID NO: 474256 - DNA, 25 bp, Artificial
  probe
  misc_feature (1)..(25): SEQ ID NO: 7667; WAN024BJX; Start 25; Stop 49
aaaaccagagcttacgccctgattt

SEQ ID NO: 474257 - DNA, 25 bp, Artificial
  probe
  misc_feature (1)..(25): SEQ ID NO: 7667; WAN024BJX; Start 48; Stop 72
ttttaggattatttcaagtttcgaa

SEQ ID NO: 474258 - DNA, 25 bp, Artificial
  probe
  misc_feature (1)..(25): SEQ ID NO: 7667; WAN024BJX; Start 54; Stop 78
gattatttcaagtttcgaacaactt

SEQ ID NO: 474259 - DNA, 25 bp, Artificial
  probe
  misc_feature (1)..(25): SEQ ID NO: 7667; WAN024BJX; Start 55; Stop 79
attatttcaagtttcgaacaacttt

SEQ ID NO: 474260 - DNA, 25 bp, Artificial
  probe
  misc_feature (1)..(25): SEQ ID NO: 7667; WAN024BJX; Start 62; Stop 86
caagtttcgaacaacttttacaaga

SEQ ID NO: 474261 - DNA, 25 bp, Artificial
  probe
  misc_feature (1)..(25): SEQ ID NO: 7667; WAN024BJX; Start 61; Stop 85
tcaagtttcgaacaacttttacaag

SEQ ID NO: 474262 - DNA, 25 bp, Artificial
  probe
  misc_feature (1)..(25): SEQ ID NO: 7667; WAN024BJX; Start 60; Stop 84
ttcaagtttcgaacaacttttacaa

SEQ ID NO: 474263 - DNA, 25 bp, Artificial
  probe
  misc_feature (1)..(25): SEQ ID NO: 7667; WAN024BJX; Start 59; Stop 83
tttcaagtttcgaacaacttttaca

SEQ ID NO: 474264 - DNA, 25 bp, Artificial
  probe
  misc_feature (1)..(25): SEQ ID NO: 7667; WAN024BJX; Start 63; Stop 87
aagtttcgaacaacttttacaagat

SEQ ID NO: 474265 - DNA, 25 bp, Artificial
  probe
  misc_feature (1)..(25): SEQ ID NO: 7667; WAN024BJX; Start 58; Stop 82
atttcaagtttcgaacaacttttac

SEQ ID NO: 474266 - DNA, 25 bp, Artificial
  probe
  misc_feature (1)..(25): SEQ ID NO: 7667; WAN024BJX; Start 56; Stop 80
ttatttcaagtttcgaacaactttt

SEQ ID NO: 474267 - DNA, 25 bp, Artificial
  probe
  misc_feature (1)..(25): SEQ ID NO: 7667; WAN024BJX; Start 57; Stop 81
tatttcaagtttcgaacaactttta

SEQ ID NO: 474268 - DNA, 25 bp, Artificial
  probe
  misc_feature (1)..(25): SEQ ID NO: 7668; WAN024CQS; Start 181; Stop 205
gaagagttatccgatgtaggttgta

SEQ ID NO: 474269 - DNA, 25 bp, Artificial
  probe
  misc_feature (1)..(25): SEQ ID NO: 7668; WAN024CQS; Start 182; Stop 206
aagagttatccgatgtaggttgtac

SEQ ID NO: 474270 - DNA, 25 bp, Artificial
  probe
  misc_feature (1)..(25): SEQ ID NO: 7668; WAN024CQS; Start 186; Stop 210
gttatccgatgtaggttgtacttcc

SEQ ID NO: 474271 - DNA, 25 bp, Artificial
  probe
  misc_feature (1)..(25): SEQ ID NO: 7668; WAN024CQS; Start 185; Stop 209
agttatccgatgtaggttgtacttc

SEQ ID NO: 474272 - DNA, 25 bp, Artificial
  probe
  misc_feature (1)..(25): SEQ ID NO: 7668; WAN024CQS; Start 184; Stop 208
gagttatccgatgtaggttgtactt

SEQ ID NO: 474273 - DNA, 25 bp, Artificial
  probe
  misc_feature (1)..(25): SEQ ID NO: 7668; WAN024CQS; Start 183; Stop 207
agagttatccgatgtaggttgtact

SEQ ID NO: 474274 - DNA, 25 bp, Artificial
  probe
  misc_feature (1)..(25): SEQ ID NO: 7668; WAN024CQS; Start 180; Stop 204
cgaagagttatccgatgtaggttgt

SEQ ID NO: 474275 - DNA, 25 bp, Artificial
  probe
  misc_feature (1)..(25): SEQ ID NO: 7668; WAN024CQS; Start 187; Stop 211
ttatccgatgtaggttgtacttccg

SEQ ID NO: 474276 - DNA, 25 bp, Artificial
  probe
  misc_feature (1)..(25): SEQ ID NO: 7668; WAN024CQS; Start 179; Stop 203
ccgaagagttatccgatgtaggttg

SEQ ID NO: 474277 - DNA, 25 bp, Artificial
  probe
  misc_feature (1)..(25): SEQ ID NO: 7668; WAN024CQS; Start 175; Stop 199
acttccgaagagttatccgatgtag

SEQ ID NO: 474278 - DNA, 25 bp, Artificial
  probe
  misc_feature (1)..(25): SEQ ID NO: 7668; WAN024CQS; Start 178; Stop 202
tccgaagagttatccgatgtaggtt

SEQ ID NO: 474279 - DNA, 25 bp, Artificial
  probe
  misc_feature (1)..(25): SEQ ID NO: 7668; WAN024CQS; Start 177; Stop 201
ttccgaagagttatccgatgtaggt

SEQ ID NO: 474280 - DNA, 25 bp, Artificial
  probe
  misc_feature (1)..(25): SEQ ID NO: 7668; WAN024CQS; Start 176; Stop 200
cttccgaagagttatccgatgtagg

SEQ ID NO: 474281 - DNA, 25 bp, Artificial
  probe
  misc_feature (1)..(25): SEQ ID NO: 7668; WAN024CQS; Start 188; Stop 212
tatccgatgtaggttgtacttccga

SEQ ID NO: 474282 - DNA, 25 bp, Artificial
  probe
  misc_feature (1)..(25): SEQ ID NO: 7668; WAN024CQS; Start 16; Stop 40
acagtaaagtcaccgctagtaaatt

SEQ ID NO: 474283 - DNA, 25 bp, Artificial
  probe
  misc_feature (1)..(25): SEQ ID NO: 7668; WAN024CQS; Start 14; Stop 38
ctacagtaaagtcaccgctagtaaa

SEQ ID NO: 474284 - DNA, 25 bp, Artificial
  probe
  misc_feature (1)..(25): SEQ ID NO: 7668; WAN024CQS; Start 15; Stop 39
tacagtaaagtcaccgctagtaaat

SEQ ID NO: 474285 - DNA, 25 bp, Artificial
  probe
  misc_feature (1)..(25): SEQ ID NO: 7668; WAN024CQS; Start 6; Stop 30
cttaatcactacagtaaagtcaccg

SEQ ID NO: 474286 - DNA, 25 bp, Artificial
  probe
  misc_feature (1)..(25): SEQ ID NO: 7668; WAN024CQS; Start 7; Stop 31
ttaatcactacagtaaagtcaccgc

SEQ ID NO: 474287 - DNA, 25 bp, Artificial
  probe
  misc_feature (1)..(25): SEQ ID NO: 7668; WAN024CQS; Start 9; Stop 33
aatcactacagtaaagtcaccgcta

SEQ ID NO: 474288 - DNA, 25 bp, Artificial
  probe
  misc_feature (1)..(25): SEQ ID NO: 7668; WAN024CQS; Start 8; Stop 32
taatcactacagtaaagtcaccgct

SEQ ID NO: 474289 - DNA, 25 bp, Artificial
  probe
  misc_feature (1)..(25): SEQ ID NO: 7668; WAN024CQS; Start 244; Stop 268
aactttggtgttgatacttcagaag

SEQ ID NO: 474290 - DNA, 25 bp, Artificial
  probe
  misc_feature (1)..(25): SEQ ID NO: 7668; WAN024CQS; Start 193; Stop 217
gatgtaggttgtacttccgaaatcg

SEQ ID NO: 474291 - DNA, 25 bp, Artificial
  probe
  misc_feature (1)..(25): SEQ ID NO: 7668; WAN024CQS; Start 192; Stop 216
cgatgtaggttgtacttccgaaatc

SEQ ID NO: 474292 - DNA, 25 bp, Artificial
  probe
  misc_feature (1)..(25): SEQ ID NO: 7668; WAN024CQS; Start 189; Stop 213
atccgatgtaggttgtacttccgaa

SEQ ID NO: 474293 - DNA, 25 bp, Artificial
  probe
  misc_feature (1)..(25): SEQ ID NO: 7668; WAN024CQS; Start 174; Stop 198
aacttccgaagagttatccgatgta

SEQ ID NO: 474294 - DNA, 25 bp, Artificial
  probe
  misc_feature (1)..(25): SEQ ID NO: 7668; WAN024CQS; Start 10; Stop 34
atcactacagtaaagtcaccgctag

SEQ ID NO: 474295 - DNA, 25 bp, Artificial
  probe
  misc_feature (1)..(25): SEQ ID NO: 7668; WAN024CQS; Start 17; Stop 41
cagtaaagtcaccgctagtaaattt

SEQ ID NO: 474296 - DNA, 25 bp, Artificial
  probe
  misc_feature (1)..(25): SEQ ID NO: 7668; WAN024CQS; Start 13; Stop 37
actacagtaaagtcaccgctagtaa

SEQ ID NO: 474297 - DNA, 25 bp, Artificial
  probe
  misc_feature (1)..(25): SEQ ID NO: 7668; WAN024CQS; Start 191; Stop 215
ccgatgtaggttgtacttccgaaat

SEQ ID NO: 474298 - DNA, 25 bp, Artificial
  probe
  misc_feature (1)..(25): SEQ ID NO: 7668; WAN024CQS; Start 12; Stop 36
cactacagtaaagtcaccgctagta

SEQ ID NO: 474299 - DNA, 25 bp, Artificial
  probe
  misc_feature (1)..(25): SEQ ID NO: 7668; WAN024CQS; Start 162; Stop 186
aggttgtacagtaacttccgaagag

SEQ ID NO: 474300 - DNA, 25 bp, Artificial
  probe
  misc_feature (1)..(25): SEQ ID NO: 7668; WAN024CQS; Start 161; Stop 185
gaggttgtacagtaacttccgaaga

SEQ ID NO: 474301 - DNA, 25 bp, Artificial
  probe
  misc_feature (1)..(25): SEQ ID NO: 7669; WAN024FJB; Start 21; Stop 45
caatgtagttgatagcgttgttgac

SEQ ID NO: 474302 - DNA, 25 bp, Artificial
  probe
  misc_feature (1)..(25): SEQ ID NO: 7669; WAN024FJB; Start 149; Stop 173
ttgctgttgacgataatcttgtgac

SEQ ID NO: 474303 - DNA, 25 bp, Artificial
  probe
  misc_feature (1)..(25): SEQ ID NO: 7669; WAN024FJB; Start 22; Stop 46
aatgtagttgatagcgttgttgaca

SEQ ID NO: 474304 - DNA, 25 bp, Artificial
  probe
  misc_feature (1)..(25): SEQ ID NO: 7669; WAN024FJB; Start 23; Stop 47
atgtagttgatagcgttgttgacag

SEQ ID NO: 474305 - DNA, 25 bp, Artificial
  probe
  misc_feature (1)..(25): SEQ ID NO: 7669; WAN024FJB; Start 154; Stop 178
gttgacgataatcttgtgacggttg

SEQ ID NO: 474306 - DNA, 25 bp, Artificial
  probe
  misc_feature (1)..(25): SEQ ID NO: 7669; WAN024FJB; Start 155; Stop 179
ttgacgataatcttgtgacggttga

SEQ ID NO: 474307 - DNA, 25 bp, Artificial
  probe
  misc_feature (1)..(25): SEQ ID NO: 7669; WAN024FJB; Start 104; Stop 128
cagcagtcaccgatagcatagatac

SEQ ID NO: 474308 - DNA, 25 bp, Artificial
  probe
  misc_feature (1)..(25): SEQ ID NO: 7669; WAN024FJB; Start 153; Stop 177
tgttgacgataatcttgtgacggtt

SEQ ID NO: 474309 - DNA, 25 bp, Artificial
  probe
  misc_feature (1)..(25): SEQ ID NO: 7669; WAN024FJB; Start 204; Stop 228
taccgacagaagatttgaaaccata

SEQ ID NO: 474310 - DNA, 25 bp, Artificial
  probe
  misc_feature (1)..(25): SEQ ID NO: 7669; WAN024FJB; Start 203; Stop 227
ttaccgacagaagatttgaaaccat

SEQ ID NO: 474311 - DNA, 25 bp, Artificial
  probe
  misc_feature (1)..(25): SEQ ID NO: 7669; WAN024FJB; Start 156; Stop 180
tgacgataatcttgtgacggttgag

SEQ ID NO: 474312 - DNA, 25 bp, Artificial
  probe
  misc_feature (1)..(25): SEQ ID NO: 7669; WAN024FJB; Start 107; Stop 131
cagtcaccgatagcatagatacctg

SEQ ID NO: 474313 - DNA, 25 bp, Artificial
  probe
  misc_feature (1)..(25): SEQ ID NO: 7669; WAN024FJB; Start 145; Stop 169
ctgtttgctgttgacgataatcttg

SEQ ID NO: 474314 - DNA, 25 bp, Artificial
  probe
  misc_feature (1)..(25): SEQ ID NO: 7669; WAN024FJB; Start 206; Stop 230
ccgacagaagatttgaaaccatagt

SEQ ID NO: 474315 - DNA, 25 bp, Artificial
  probe
  misc_feature (1)..(25): SEQ ID NO: 7669; WAN024FJB; Start 205; Stop 229
accgacagaagatttgaaaccatag

SEQ ID NO: 474316 - DNA, 25 bp, Artificial
  probe
  misc_feature (1)..(25): SEQ ID NO: 7669; WAN024FJB; Start 120; Stop 144
catagatacctgcttggctggattc

SEQ ID NO: 474317 - DNA, 25 bp, Artificial
  probe
  misc_feature (1)..(25): SEQ ID NO: 7669; WAN024FJB; Start 198; Stop 222
taaggttaccgacagaagatttgaa

SEQ ID NO: 474318 - DNA, 25 bp, Artificial
  probe
  misc_feature (1)..(25): SEQ ID NO: 7669; WAN024FJB; Start 197; Stop 221
ttaaggttaccgacagaagatttga

SEQ ID NO: 474319 - DNA, 25 bp, Artificial
  probe
  misc_feature (1)..(25): SEQ ID NO: 7669; WAN024FJB; Start 207; Stop 231
cgacagaagatttgaaaccatagtt

SEQ ID NO: 474320 - DNA, 25 bp, Artificial
  probe
  misc_feature (1)..(25): SEQ ID NO: 7669; WAN024FJB; Start 148; Stop 172
tttgctgttgacgataatcttgtga

SEQ ID NO: 474321 - DNA, 25 bp, Artificial
  probe
  misc_feature (1)..(25): SEQ ID NO: 7669; WAN024FJB; Start 147; Stop 171
gtttgctgttgacgataatcttgtg

SEQ ID NO: 474322 - DNA, 25 bp, Artificial
  probe
  misc_feature (1)..(25): SEQ ID NO: 7669; WAN024FJB; Start 141; Stop 165
attcctgtttgctgttgacgataat

SEQ ID NO: 474323 - DNA, 25 bp, Artificial
  probe
  misc_feature (1)..(25): SEQ ID NO: 7669; WAN024FJB; Start 199; Stop 223
aaggttaccgacagaagatttgaaa

SEQ ID NO: 474324 - DNA, 25 bp, Artificial
  probe
  misc_feature (1)..(25): SEQ ID NO: 7669; WAN024FJB; Start 196; Stop 220
tttaaggttaccgacagaagatttg

SEQ ID NO: 474325 - DNA, 25 bp, Artificial
  probe
  misc_feature (1)..(25): SEQ ID NO: 7669; WAN024FJB; Start 152; Stop 176
ctgttgacgataatcttgtgacggt

SEQ ID NO: 474326 - DNA, 25 bp, Artificial
  probe
  misc_feature (1)..(25): SEQ ID NO: 7669; WAN024FJB; Start 146; Stop 170
tgtttgctgttgacgataatcttgt

SEQ ID NO: 474327 - DNA, 25 bp, Artificial
  probe
  misc_feature (1)..(25): SEQ ID NO: 7669; WAN024FJB; Start 211; Stop 235
agaagatttgaaaccatagttgaca

SEQ ID NO: 474328 - DNA, 25 bp, Artificial
  probe
  misc_feature (1)..(25): SEQ ID NO: 7669; WAN024FJB; Start 209; Stop 233
acagaagatttgaaaccatagttga

SEQ ID NO: 474329 - DNA, 25 bp, Artificial
  probe
  misc_feature (1)..(25): SEQ ID NO: 7669; WAN024FJB; Start 144; Stop 168
cctgtttgctgttgacgataatctt

SEQ ID NO: 474330 - DNA, 25 bp, Artificial
  probe
  misc_feature (1)..(25): SEQ ID NO: 7669; WAN024FJB; Start 142; Stop 166
ttcctgtttgctgttgacgataatc

SEQ ID NO: 474331 - DNA, 25 bp, Artificial
  probe
  misc_feature (1)..(25): SEQ ID NO: 7669; WAN024FJB; Start 140; Stop 164
gattcctgtttgctgttgacgataa

SEQ ID NO: 474332 - DNA, 25 bp, Artificial
  probe
  misc_feature (1)..(25): SEQ ID NO: 7669; WAN024FJB; Start 202; Stop 226
gttaccgacagaagatttgaaacca

SEQ ID NO: 474333 - DNA, 25 bp, Artificial
  probe
  misc_feature (1)..(25): SEQ ID NO: 7669; WAN024FJB; Start 210; Stop 234
cagaagatttgaaaccatagttgac

SEQ ID NO: 474334 - DNA, 25 bp, Artificial
  probe
  misc_feature (1)..(25): SEQ ID NO: 7670; WAN024BXN; Start 63; Stop 87
gacagatagaagtgatcctgagtca

SEQ ID NO: 474335 - DNA, 25 bp, Artificial
  probe
  misc_feature (1)..(25): SEQ ID NO: 7670; WAN024BXN; Start 60; Stop 84
aacgacagatagaagtgatcctgag

SEQ ID NO: 474336 - DNA, 25 bp, Artificial
  probe
  misc_feature (1)..(25): SEQ ID NO: 7670; WAN024BXN; Start 62; Stop 86
cgacagatagaagtgatcctgagtc

SEQ ID NO: 474337 - DNA, 25 bp, Artificial
  probe
  misc_feature (1)..(25): SEQ ID NO: 7670; WAN024BXN; Start 76; Stop 100
gatcctgagtcacggttatctttaa

SEQ ID NO: 474338 - DNA, 25 bp, Artificial
  probe
  misc_feature (1)..(25): SEQ ID NO: 7670; WAN024BXN; Start 61; Stop 85
acgacagatagaagtgatcctgagt

SEQ ID NO: 474339 - DNA, 25 bp, Artificial
  probe
  misc_feature (1)..(25): SEQ ID NO: 7670; WAN024BXN; Start 8; Stop 32
cacgaggaaagatgtacgacttatc

SEQ ID NO: 474340 - DNA, 25 bp, Artificial
  probe
  misc_feature (1)..(25): SEQ ID NO: 7670; WAN024BXN; Start 75; Stop 99
tgatcctgagtcacggttatcttta

SEQ ID NO: 474341 - DNA, 25 bp, Artificial
  probe
  misc_feature (1)..(25): SEQ ID NO: 7670; WAN024BXN; Start 77; Stop 101
atcctgagtcacggttatctttaaa

SEQ ID NO: 474342 - DNA, 25 bp, Artificial
  probe
  misc_feature (1)..(25): SEQ ID NO: 7670; WAN024BXN; Start 59; Stop 83
aaacgacagatagaagtgatcctga

SEQ ID NO: 474343 - DNA, 25 bp, Artificial
  probe
  misc_feature (1)..(25): SEQ ID NO: 7670; WAN024BXN; Start 7; Stop 31
acacgaggaaagatgtacgacttat

SEQ ID NO: 474344 - DNA, 25 bp, Artificial
  probe
  misc_feature (1)..(25): SEQ ID NO: 7670; WAN024BXN; Start 4; Stop 28
tatacacgaggaaagatgtacgact

SEQ ID NO: 474345 - DNA, 25 bp, Artificial
  probe
  misc_feature (1)..(25): SEQ ID NO: 7670; WAN024BXN; Start 9; Stop 33
acgaggaaagatgtacgacttatcc

SEQ ID NO: 474346 - DNA, 25 bp, Artificial
  probe
  misc_feature (1)..(25): SEQ ID NO: 7670; WAN024BXN; Start 6; Stop 30
tacacgaggaaagatgtacgactta

SEQ ID NO: 474347 - DNA, 25 bp, Artificial
  probe
  misc_feature (1)..(25): SEQ ID NO: 7670; WAN024BXN; Start 53; Stop 77
aagagaaaacgacagatagaagtga

SEQ ID NO: 474348 - DNA, 25 bp, Artificial
  probe
  misc_feature (1)..(25): SEQ ID NO: 7670; WAN024BXN; Start 54; Stop 78
agagaaaacgacagatagaagtgat

SEQ ID NO: 474349 - DNA, 25 bp, Artificial
  probe
  misc_feature (1)..(25): SEQ ID NO: 7670; WAN024BXN; Start 52; Stop 76
aaagagaaaacgacagatagaagtg

SEQ ID NO: 474350 - DNA, 25 bp, Artificial
  probe
  misc_feature (1)..(25): SEQ ID NO: 7670; WAN024BXN; Start 5; Stop 29
atacacgaggaaagatgtacgactt

SEQ ID NO: 474351 - DNA, 25 bp, Artificial
  probe
  misc_feature (1)..(25): SEQ ID NO: 7670; WAN024BXN; Start 11; Stop 35
gaggaaagatgtacgacttatcccg

SEQ ID NO: 474352 - DNA, 25 bp, Artificial
  probe
  misc_feature (1)..(25): SEQ ID NO: 7670; WAN024BXN; Start 10; Stop 34
cgaggaaagatgtacgacttatccc

SEQ ID NO: 474353 - DNA, 25 bp, Artificial
  probe
  misc_feature (1)..(25): SEQ ID NO: 7670; WAN024BXN; Start 57; Stop 81
gaaaacgacagatagaagtgatcct

SEQ ID NO: 474354 - DNA, 25 bp, Artificial
  probe
  misc_feature (1)..(25): SEQ ID NO: 7670; WAN024BXN; Start 56; Stop 80
agaaaacgacagatagaagtgatcc

SEQ ID NO: 474355 - DNA, 25 bp, Artificial
  probe
  misc_feature (1)..(25): SEQ ID NO: 7670; WAN024BXN; Start 55; Stop 79
gagaaaacgacagatagaagtgatc

SEQ ID NO: 474356 - DNA, 25 bp, Artificial
  probe
  misc_feature (1)..(25): SEQ ID NO: 7670; WAN024BXN; Start 36; Stop 60
tgaggtctatcactataaagagaaa

SEQ ID NO: 474357 - DNA, 25 bp, Artificial
  probe
  misc_feature (1)..(25): SEQ ID NO: 7670; WAN024BXN; Start 64; Stop 88
acagatagaagtgatcctgagtcac

SEQ ID NO: 474358 - DNA, 25 bp, Artificial
  probe
  misc_feature (1)..(25): SEQ ID NO: 7670; WAN024BXN; Start 45; Stop 69
tcactataaagagaaaacgacagat

SEQ ID NO: 474359 - DNA, 25 bp, Artificial
  probe
  misc_feature (1)..(25): SEQ ID NO: 7670; WAN024BXN; Start 44; Stop 68
atcactataaagagaaaacgacaga

SEQ ID NO: 474360 - DNA, 25 bp, Artificial
  probe
  misc_feature (1)..(25): SEQ ID NO: 7670; WAN024BXN; Start 51; Stop 75
taaagagaaaacgacagatagaagt

SEQ ID NO: 474361 - DNA, 25 bp, Artificial
  probe
  misc_feature (1)..(25): SEQ ID NO: 7670; WAN024BXN; Start 3; Stop 27
gtatacacgaggaaagatgtacgac

SEQ ID NO: 474362 - DNA, 25 bp, Artificial
  probe
  misc_feature (1)..(25): SEQ ID NO: 7670; WAN024BXN; Start 78; Stop 102
tcctgagtcacggttatctttaaaa

SEQ ID NO: 474363 - DNA, 25 bp, Artificial
  probe
  misc_feature (1)..(25): SEQ ID NO: 7670; WAN024BXN; Start 58; Stop 82
aaaacgacagatagaagtgatcctg

SEQ ID NO: 474364 - DNA, 25 bp, Artificial
  probe
  misc_feature (1)..(25): SEQ ID NO: 7670; WAN024BXN; Start 15; Stop 39
aaagatgtacgacttatcccgtgag

SEQ ID NO: 474365 - DNA, 25 bp, Artificial
  probe
  misc_feature (1)..(25): SEQ ID NO: 7670; WAN024BXN; Start 14; Stop 38
gaaagatgtacgacttatcccgtga

SEQ ID NO: 474366 - DNA, 25 bp, Artificial
  probe
  misc_feature (1)..(25): SEQ ID NO: 7670; WAN024BXN; Start 65; Stop 89
cagatagaagtgatcctgagtcacg

SEQ ID NO: 474367 - DNA, 25 bp, Artificial
  probe
  misc_feature (1)..(25): SEQ ID NO: 7671; WAN024AVE; Start 55; Stop 79
tttgaacacttgataggaggtcttt

SEQ ID NO: 474368 - DNA, 25 bp, Artificial
  probe
  misc_feature (1)..(25): SEQ ID NO: 7671; WAN024AVE; Start 56; Stop 80
ttgaacacttgataggaggtctttt

SEQ ID NO: 474369 - DNA, 25 bp, Artificial
  probe
  misc_feature (1)..(25): SEQ ID NO: 7671; WAN024AVE; Start 54; Stop 78
ttttgaacacttgataggaggtctt

SEQ ID NO: 474370 - DNA, 25 bp, Artificial
  probe
  misc_feature (1)..(25): SEQ ID NO: 7671; WAN024AVE; Start 29; Stop 53
acaaaacaagacctcctatcaaagt

SEQ ID NO: 474371 - DNA, 25 bp, Artificial
  probe
  misc_feature (1)..(25): SEQ ID NO: 7671; WAN024AVE; Start 28; Stop 52
cacaaaacaagacctcctatcaaag

SEQ ID NO: 474372 - DNA, 25 bp, Artificial
  probe
  misc_feature (1)..(25): SEQ ID NO: 7671; WAN024AVE; Start 27; Stop 51
tcacaaaacaagacctcctatcaaa

SEQ ID NO: 474373 - DNA, 25 bp, Artificial
  probe
  misc_feature (1)..(25): SEQ ID NO: 7671; WAN024AVE; Start 26; Stop 50
ttcacaaaacaagacctcctatcaa

SEQ ID NO: 474374 - DNA, 25 bp, Artificial
  probe
  misc_feature (1)..(25): SEQ ID NO: 7671; WAN024AVE; Start 25; Stop 49
tttcacaaaacaagacctcctatca

SEQ ID NO: 474375 - DNA, 25 bp, Artificial
  probe
  misc_feature (1)..(25): SEQ ID NO: 7671; WAN024AVE; Start 30; Stop 54
caaaacaagacctcctatcaaagtt

SEQ ID NO: 474376 - DNA, 25 bp, Artificial
  probe
  misc_feature (1)..(25): SEQ ID NO: 7671; WAN024AVE; Start 24; Stop 48
ttttcacaaaacaagacctcctatc

SEQ ID NO: 474377 - DNA, 25 bp, Artificial
  probe
  misc_feature (1)..(25): SEQ ID NO: 7671; WAN024AVE; Start 23; Stop 47
attttcacaaaacaagacctcctat

SEQ ID NO: 474378 - DNA, 25 bp, Artificial
  probe
  misc_feature (1)..(25): SEQ ID NO: 7671; WAN024AVE; Start 21; Stop 45
atattttcacaaaacaagacctcct

SEQ ID NO: 474379 - DNA, 25 bp, Artificial
  probe
  misc_feature (1)..(25): SEQ ID NO: 7671; WAN024AVE; Start 22; Stop 46
tattttcacaaaacaagacctccta

SEQ ID NO: 474380 - DNA, 25 bp, Artificial
  probe
  misc_feature (1)..(25): SEQ ID NO: 7671; WAN024AVE; Start 31; Stop 55
aaaacaagacctcctatcaaagttt

SEQ ID NO: 474381 - DNA, 25 bp, Artificial
  probe
  misc_feature (1)..(25): SEQ ID NO: 7671; WAN024AVE; Start 20; Stop 44
aatattttcacaaaacaagacctcc

SEQ ID NO: 474382 - DNA, 25 bp, Artificial
  probe
  misc_feature (1)..(25): SEQ ID NO: 7671; WAN024AVE; Start 19; Stop 43
aaatattttcacaaaacaagacctc

SEQ ID NO: 474383 - DNA, 25 bp, Artificial
  probe
  misc_feature (1)..(25): SEQ ID NO: 7671; WAN024AVE; Start 18; Stop 42
taaatattttcacaaaacaagacct

SEQ ID NO: 474384 - DNA, 25 bp, Artificial
  probe
  misc_feature (1)..(25): SEQ ID NO: 7672; WAN024BY4; Start 74; Stop 98
tacaatacagaactcaatcctcgtt

SEQ ID NO: 474385 - DNA, 25 bp, Artificial
  probe
  misc_feature (1)..(25): SEQ ID NO: 7672; WAN024BY4; Start 73; Stop 97
gtacaatacagaactcaatcctcgt

SEQ ID NO: 474386 - DNA, 25 bp, Artificial
  probe
  misc_feature (1)..(25): SEQ ID NO: 7672; WAN024BY4; Start 10; Stop 34
cattctgacactttggtgattgaaa

SEQ ID NO: 474387 - DNA, 25 bp, Artificial
  probe
  misc_feature (1)..(25): SEQ ID NO: 7672; WAN024BY4; Start 7; Stop 31
aaacattctgacactttggtgattg

SEQ ID NO: 474388 - DNA, 25 bp, Artificial
  probe
  misc_feature (1)..(25): SEQ ID NO: 7672; WAN024BY4; Start 9; Stop 33
acattctgacactttggtgattgaa

SEQ ID NO: 474389 - DNA, 25 bp, Artificial
  probe
  misc_feature (1)..(25): SEQ ID NO: 7672; WAN024BY4; Start 8; Stop 32
aacattctgacactttggtgattga

SEQ ID NO: 474390 - DNA, 25 bp, Artificial
  probe
  misc_feature (1)..(25): SEQ ID NO: 7672; WAN024BY4; Start 75; Stop 99
acaatacagaactcaatcctcgttc

SEQ ID NO: 474391 - DNA, 25 bp, Artificial
  probe
  misc_feature (1)..(25): SEQ ID NO: 7672; WAN024BY4; Start 72; Stop 96
tgtacaatacagaactcaatcctcg

SEQ ID NO: 474392 - DNA, 25 bp, Artificial
  probe
  misc_feature (1)..(25): SEQ ID NO: 7672; WAN024BY4; Start 6; Stop 30
aaaacattctgacactttggtgatt

SEQ ID NO: 474393 - DNA, 25 bp, Artificial
  probe
  misc_feature (1)..(25): SEQ ID NO: 7672; WAN024BY4; Start 11; Stop 35
attctgacactttggtgattgaaaa

SEQ ID NO: 474394 - DNA, 25 bp, Artificial
  probe
  misc_feature (1)..(25): SEQ ID NO: 7672; WAN024BY4; Start 5; Stop 29
caaaacattctgacactttggtgat

SEQ ID NO: 474395 - DNA, 25 bp, Artificial
  probe
  misc_feature (1)..(25): SEQ ID NO: 7672; WAN024BY4; Start 44; Stop 68
ttaagctgactctaaaaggaccgag

SEQ ID NO: 474396 - DNA, 25 bp, Artificial
  probe
  misc_feature (1)..(25): SEQ ID NO: 7672; WAN024BY4; Start 4; Stop 28
tcaaaacattctgacactttggtga

SEQ ID NO: 474397 - DNA, 25 bp, Artificial
  probe
  misc_feature (1)..(25): SEQ ID NO: 7672; WAN024BY4; Start 43; Stop 67
cttaagctgactctaaaaggaccga

SEQ ID NO: 474398 - DNA, 25 bp, Artificial
  probe
  misc_feature (1)..(25): SEQ ID NO: 7672; WAN024BY4; Start 3; Stop 27
gtcaaaacattctgacactttggtg

SEQ ID NO: 474399 - DNA, 25 bp, Artificial
  probe
  misc_feature (1)..(25): SEQ ID NO: 7672; WAN024BY4; Start 45; Stop 69
taagctgactctaaaaggaccgagc

SEQ ID NO: 474400 - DNA, 25 bp, Artificial
  probe
  misc_feature (1)..(25): SEQ ID NO: 7672; WAN024BY4; Start 40; Stop 64
agccttaagctgactctaaaaggac

SEQ ID NO: 474401 - DNA, 25 bp, Artificial
  probe
  misc_feature (1)..(25): SEQ ID NO: 7672; WAN024BY4; Start 51; Stop 75
gactctaaaaggaccgagccttgta

SEQ ID NO: 474402 - DNA, 25 bp, Artificial
  probe
  misc_feature (1)..(25): SEQ ID NO: 7672; WAN024BY4; Start 42; Stop 66
ccttaagctgactctaaaaggaccg

SEQ ID NO: 474403 - DNA, 25 bp, Artificial
  probe
  misc_feature (1)..(25): SEQ ID NO: 7672; WAN024BY4; Start 41; Stop 65
gccttaagctgactctaaaaggacc

SEQ ID NO: 474404 - DNA, 25 bp, Artificial
  probe
  misc_feature (1)..(25): SEQ ID NO: 7672; WAN024BY4; Start 52; Stop 76
actctaaaaggaccgagccttgtac

SEQ ID NO: 474405 - DNA, 25 bp, Artificial
  probe
  misc_feature (1)..(25): SEQ ID NO: 7672; WAN024BY4; Start 49; Stop 73
ctgactctaaaaggaccgagccttg

SEQ ID NO: 474406 - DNA, 25 bp, Artificial
  probe
  misc_feature (1)..(25): SEQ ID NO: 7672; WAN024BY4; Start 53; Stop 77
ctctaaaaggaccgagccttgtaca

SEQ ID NO: 474407 - DNA, 25 bp, Artificial
  probe
  misc_feature (1)..(25): SEQ ID NO: 7673; WAN024EUC; Start 133; Stop 157
ttccaccttgtaagtatcaaccaat

SEQ ID NO: 474408 - DNA, 25 bp, Artificial
  probe
  misc_feature (1)..(25): SEQ ID NO: 7673; WAN024EUC; Start 128; Stop 152
aatcgttccaccttgtaagtatcaa

SEQ ID NO: 474409 - DNA, 25 bp, Artificial
  probe
  misc_feature (1)..(25): SEQ ID NO: 7673; WAN024EUC; Start 136; Stop 160
caccttgtaagtatcaaccaattcc

SEQ ID NO: 474410 - DNA, 25 bp, Artificial
  probe
  misc_feature (1)..(25): SEQ ID NO: 7673; WAN024EUC; Start 135; Stop 159
ccaccttgtaagtatcaaccaattc

SEQ ID NO: 474411 - DNA, 25 bp, Artificial
  probe
  misc_feature (1)..(25): SEQ ID NO: 7673; WAN024EUC; Start 134; Stop 158
tccaccttgtaagtatcaaccaatt

SEQ ID NO: 474412 - DNA, 25 bp, Artificial
  probe
  misc_feature (1)..(25): SEQ ID NO: 7673; WAN024EUC; Start 137; Stop 161
accttgtaagtatcaaccaattcct

SEQ ID NO: 474413 - DNA, 25 bp, Artificial
  probe
  misc_feature (1)..(25): SEQ ID NO: 7673; WAN024EUC; Start 129; Stop 153
atcgttccaccttgtaagtatcaac

SEQ ID NO: 474414 - DNA, 25 bp, Artificial
  probe
  misc_feature (1)..(25): SEQ ID NO: 7673; WAN024EUC; Start 132; Stop 156
gttccaccttgtaagtatcaaccaa

SEQ ID NO: 474415 - DNA, 25 bp, Artificial
  probe
  misc_feature (1)..(25): SEQ ID NO: 7673; WAN024EUC; Start 10; Stop 34
gttcatcctgatagtctactggtaa

SEQ ID NO: 474416 - DNA, 25 bp, Artificial
  probe
  misc_feature (1)..(25): SEQ ID NO: 7673; WAN024EUC; Start 9; Stop 33
cgttcatcctgatagtctactggta

SEQ ID NO: 474417 - DNA, 25 bp, Artificial
  probe
  misc_feature (1)..(25): SEQ ID NO: 7673; WAN024EUC; Start 138; Stop 162
ccttgtaagtatcaaccaattcctt

SEQ ID NO: 474418 - DNA, 25 bp, Artificial
  probe
  misc_feature (1)..(25): SEQ ID NO: 7673; WAN024EUC; Start 143; Stop 167
taagtatcaaccaattccttaacgc

SEQ ID NO: 474419 - DNA, 25 bp, Artificial
  probe
  misc_feature (1)..(25): SEQ ID NO: 7673; WAN024EUC; Start 6; Stop 30
aagcgttcatcctgatagtctactg

SEQ ID NO: 474420 - DNA, 25 bp, Artificial
  probe
  misc_feature (1)..(25): SEQ ID NO: 7673; WAN024EUC; Start 5; Stop 29
caagcgttcatcctgatagtctact

SEQ ID NO: 474421 - DNA, 25 bp, Artificial
  probe
  misc_feature (1)..(25): SEQ ID NO: 7673; WAN024EUC; Start 4; Stop 28
tcaagcgttcatcctgatagtctac

SEQ ID NO: 474422 - DNA, 25 bp, Artificial
  probe
  misc_feature (1)..(25): SEQ ID NO: 7673; WAN024EUC; Start 3; Stop 27
gtcaagcgttcatcctgatagtcta

SEQ ID NO: 474423 - DNA, 25 bp, Artificial
  probe
  misc_feature (1)..(25): SEQ ID NO: 7673; WAN024EUC; Start 130; Stop 154
tcgttccaccttgtaagtatcaacc

SEQ ID NO: 474424 - DNA, 25 bp, Artificial
  probe
  misc_feature (1)..(25): SEQ ID NO: 7673; WAN024EUC; Start 127; Stop 151
aaatcgttccaccttgtaagtatca

SEQ ID NO: 474425 - DNA, 25 bp, Artificial
  probe
  misc_feature (1)..(25): SEQ ID NO: 7673; WAN024EUC; Start 142; Stop 166
gtaagtatcaaccaattccttaacg

SEQ ID NO: 474426 - DNA, 25 bp, Artificial
  probe
  misc_feature (1)..(25): SEQ ID NO: 7673; WAN024EUC; Start 196; Stop 220
atttatctggatgatttcaagccct

SEQ ID NO: 474427 - DNA, 25 bp, Artificial
  probe
  misc_feature (1)..(25): SEQ ID NO: 7673; WAN024EUC; Start 197; Stop 221
tttatctggatgatttcaagccctt

SEQ ID NO: 474428 - DNA, 25 bp, Artificial
  probe
  misc_feature (1)..(25): SEQ ID NO: 7673; WAN024EUC; Start 184; Stop 208
gccttgttcttcatttatctggatg

SEQ ID NO: 474429 - DNA, 25 bp, Artificial
  probe
  misc_feature (1)..(25): SEQ ID NO: 7673; WAN024EUC; Start 195; Stop 219
catttatctggatgatttcaagccc

SEQ ID NO: 474430 - DNA, 25 bp, Artificial
  probe
  misc_feature (1)..(25): SEQ ID NO: 7673; WAN024EUC; Start 131; Stop 155
cgttccaccttgtaagtatcaacca

SEQ ID NO: 474431 - DNA, 25 bp, Artificial
  probe
  misc_feature (1)..(25): SEQ ID NO: 7673; WAN024EUC; Start 13; Stop 37
catcctgatagtctactggtaaacc

SEQ ID NO: 474432 - DNA, 25 bp, Artificial
  probe
  misc_feature (1)..(25): SEQ ID NO: 7673; WAN024EUC; Start 126; Stop 150
caaatcgttccaccttgtaagtatc

SEQ ID NO: 474433 - DNA, 25 bp, Artificial
  probe
  misc_feature (1)..(25): SEQ ID NO: 7673; WAN024EUC; Start 1; Stop 25
ttgtcaagcgttcatcctgatagtc

SEQ ID NO: 474434 - DNA, 25 bp, Artificial
  probe
  misc_feature (1)..(25): SEQ ID NO: 7673; WAN024EUC; Start 12; Stop 36
tcatcctgatagtctactggtaaac

SEQ ID NO: 474435 - DNA, 25 bp, Artificial
  probe
  misc_feature (1)..(25): SEQ ID NO: 7673; WAN024EUC; Start 11; Stop 35
ttcatcctgatagtctactggtaaa

SEQ ID NO: 474436 - DNA, 25 bp, Artificial
  probe
  misc_feature (1)..(25): SEQ ID NO: 7673; WAN024EUC; Start 141; Stop 165
tgtaagtatcaaccaattccttaac

SEQ ID NO: 474437 - DNA, 25 bp, Artificial
  probe
  misc_feature (1)..(25): SEQ ID NO: 7673; WAN024EUC; Start 198; Stop 222
ttatctggatgatttcaagcccttg

SEQ ID NO: 474438 - DNA, 25 bp, Artificial
  probe
  misc_feature (1)..(25): SEQ ID NO: 7673; WAN024EUC; Start 7; Stop 31
agcgttcatcctgatagtctactgg

SEQ ID NO: 474439 - DNA, 25 bp, Artificial
  probe
  misc_feature (1)..(25): SEQ ID NO: 7673; WAN024EUC; Start 139; Stop 163
cttgtaagtatcaaccaattcctta

SEQ ID NO: 474440 - DNA, 25 bp, Artificial
  probe
  misc_feature (1)..(25): SEQ ID NO: 7674; WAN024EYW; Start 250; Stop 274
tccttaacaatcttaccaacctcag

SEQ ID NO: 474441 - DNA, 25 bp, Artificial
  probe
  misc_feature (1)..(25): SEQ ID NO: 7674; WAN024EYW; Start 249; Stop 273
ttccttaacaatcttaccaacctca

SEQ ID NO: 474442 - DNA, 25 bp, Artificial
  probe
  misc_feature (1)..(25): SEQ ID NO: 7674; WAN024EYW; Start 251; Stop 275
ccttaacaatcttaccaacctcaga

SEQ ID NO: 474443 - DNA, 25 bp, Artificial
  probe
  misc_feature (1)..(25): SEQ ID NO: 7674; WAN024EYW; Start 257; Stop 281
caatcttaccaacctcagaatcctt

SEQ ID NO: 474444 - DNA, 25 bp, Artificial
  probe
  misc_feature (1)..(25): SEQ ID NO: 7674; WAN024EYW; Start 255; Stop 279
aacaatcttaccaacctcagaatcc

SEQ ID NO: 474445 - DNA, 25 bp, Artificial
  probe
  misc_feature (1)..(25): SEQ ID NO: 7674; WAN024EYW; Start 260; Stop 284
tcttaccaacctcagaatccttatt

SEQ ID NO: 474446 - DNA, 25 bp, Artificial
  probe
  misc_feature (1)..(25): SEQ ID NO: 7674; WAN024EYW; Start 258; Stop 282
aatcttaccaacctcagaatcctta

SEQ ID NO: 474447 - DNA, 25 bp, Artificial
  probe
  misc_feature (1)..(25): SEQ ID NO: 7674; WAN024EYW; Start 259; Stop 283
atcttaccaacctcagaatccttat

SEQ ID NO: 474448 - DNA, 25 bp, Artificial
  probe
  misc_feature (1)..(25): SEQ ID NO: 7674; WAN024EYW; Start 252; Stop 276
cttaacaatcttaccaacctcagaa

SEQ ID NO: 474449 - DNA, 25 bp, Artificial
  probe
  misc_feature (1)..(25): SEQ ID NO: 7674; WAN024EYW; Start 256; Stop 280
acaatcttaccaacctcagaatcct

SEQ ID NO: 474450 - DNA, 25 bp, Artificial
  probe
  misc_feature (1)..(25): SEQ ID NO: 7674; WAN024EYW; Start 254; Stop 278
taacaatcttaccaacctcagaatc

SEQ ID NO: 474451 - DNA, 25 bp, Artificial
  probe
  misc_feature (1)..(25): SEQ ID NO: 7674; WAN024EYW; Start 253; Stop 277
ttaacaatcttaccaacctcagaat

SEQ ID NO: 474452 - DNA, 25 bp, Artificial
  probe
  misc_feature (1)..(25): SEQ ID NO: 7674; WAN024EYW; Start 216; Stop 240
ggcttcagtaatatctccagataga

SEQ ID NO: 474453 - DNA, 25 bp, Artificial
  probe
  misc_feature (1)..(25): SEQ ID NO: 7674; WAN024EYW; Start 248; Stop 272
tttccttaacaatcttaccaacctc

SEQ ID NO: 474454 - DNA, 25 bp, Artificial
  probe
  misc_feature (1)..(25): SEQ ID NO: 7674; WAN024EYW; Start 215; Stop 239
tggcttcagtaatatctccagatag

SEQ ID NO: 474455 - DNA, 25 bp, Artificial
  probe
  misc_feature (1)..(25): SEQ ID NO: 7674; WAN024EYW; Start 113; Stop 137
gaggacttagacggtttaccaattt

SEQ ID NO: 474456 - DNA, 25 bp, Artificial
  probe
  misc_feature (1)..(25): SEQ ID NO: 7674; WAN024EYW; Start 261; Stop 285
cttaccaacctcagaatccttattt

SEQ ID NO: 474457 - DNA, 25 bp, Artificial
  probe
  misc_feature (1)..(25): SEQ ID NO: 7674; WAN024EYW; Start 214; Stop 238
ttggcttcagtaatatctccagata

SEQ ID NO: 474458 - DNA, 25 bp, Artificial
  probe
  misc_feature (1)..(25): SEQ ID NO: 7674; WAN024EYW; Start 207; Stop 231
ggtgagtttggcttcagtaatatct

SEQ ID NO: 474459 - DNA, 25 bp, Artificial
  probe
  misc_feature (1)..(25): SEQ ID NO: 7674; WAN024EYW; Start 218; Stop 242
cttcagtaatatctccagatagagc

SEQ ID NO: 474460 - DNA, 25 bp, Artificial
  probe
  misc_feature (1)..(25): SEQ ID NO: 7674; WAN024EYW; Start 217; Stop 241
gcttcagtaatatctccagatagag

SEQ ID NO: 474461 - DNA, 25 bp, Artificial
  probe
  misc_feature (1)..(25): SEQ ID NO: 7674; WAN024EYW; Start 209; Stop 233
tgagtttggcttcagtaatatctcc

SEQ ID NO: 474462 - DNA, 25 bp, Artificial
  probe
  misc_feature (1)..(25): SEQ ID NO: 7674; WAN024EYW; Start 208; Stop 232
gtgagtttggcttcagtaatatctc

SEQ ID NO: 474463 - DNA, 25 bp, Artificial
  probe
  misc_feature (1)..(25): SEQ ID NO: 7674; WAN024EYW; Start 219; Stop 243
ttcagtaatatctccagatagagct

SEQ ID NO: 474464 - DNA, 25 bp, Artificial
  probe
  misc_feature (1)..(25): SEQ ID NO: 7674; WAN024EYW; Start 206; Stop 230
cggtgagtttggcttcagtaatatc

SEQ ID NO: 474465 - DNA, 25 bp, Artificial
  probe
  misc_feature (1)..(25): SEQ ID NO: 7674; WAN024EYW; Start 205; Stop 229
tcggtgagtttggcttcagtaatat

SEQ ID NO: 474466 - DNA, 25 bp, Artificial
  probe
  misc_feature (1)..(25): SEQ ID NO: 7674; WAN024EYW; Start 212; Stop 236
gtttggcttcagtaatatctccaga

SEQ ID NO: 474467 - DNA, 25 bp, Artificial
  probe
  misc_feature (1)..(25): SEQ ID NO: 7674; WAN024EYW; Start 211; Stop 235
agtttggcttcagtaatatctccag

SEQ ID NO: 474468 - DNA, 25 bp, Artificial
  probe
  misc_feature (1)..(25): SEQ ID NO: 7674; WAN024EYW; Start 210; Stop 234
gagtttggcttcagtaatatctcca

SEQ ID NO: 474469 - DNA, 25 bp, Artificial
  probe
  misc_feature (1)..(25): SEQ ID NO: 7674; WAN024EYW; Start 204; Stop 228
ttcggtgagtttggcttcagtaata

SEQ ID NO: 474470 - DNA, 25 bp, Artificial
  probe
  misc_feature (1)..(25): SEQ ID NO: 7674; WAN024EYW; Start 213; Stop 237
tttggcttcagtaatatctccagat

SEQ ID NO: 474471 - DNA, 25 bp, Artificial
  probe
  misc_feature (1)..(25): SEQ ID NO: 7674; WAN024EYW; Start 220; Stop 244
tcagtaatatctccagatagagcta

SEQ ID NO: 474472 - DNA, 25 bp, Artificial
  probe
  misc_feature (1)..(25): SEQ ID NO: 7674; WAN024EYW; Start 112; Stop 136
cgaggacttagacggtttaccaatt

SEQ ID NO: 474473 - DNA, 25 bp, Artificial
  probe
  misc_feature (1)..(25): SEQ ID NO: 7675; WAN024FHL; Start 319; Stop 343
tccaaggatataatcaatagcaccg

SEQ ID NO: 474474 - DNA, 25 bp, Artificial
  probe
  misc_feature (1)..(25): SEQ ID NO: 7675; WAN024FHL; Start 132; Stop 156
cctcatatccgatatagttggtcac

SEQ ID NO: 474475 - DNA, 25 bp, Artificial
  probe
  misc_feature (1)..(25): SEQ ID NO: 7675; WAN024FHL; Start 133; Stop 157
ctcatatccgatatagttggtcaca

SEQ ID NO: 474476 - DNA, 25 bp, Artificial
  probe
  misc_feature (1)..(25): SEQ ID NO: 7675; WAN024FHL; Start 318; Stop 342
ttccaaggatataatcaatagcacc

SEQ ID NO: 474477 - DNA, 25 bp, Artificial
  probe
  misc_feature (1)..(25): SEQ ID NO: 7675; WAN024FHL; Start 134; Stop 158
tcatatccgatatagttggtcacaa

SEQ ID NO: 474478 - DNA, 25 bp, Artificial
  probe
  misc_feature (1)..(25): SEQ ID NO: 7675; WAN024FHL; Start 273; Stop 297
tataaatgaggaaggtgacgggata

SEQ ID NO: 474479 - DNA, 25 bp, Artificial
  probe
  misc_feature (1)..(25): SEQ ID NO: 7675; WAN024FHL; Start 268; Stop 292
aaaggtataaatgaggaaggtgacg

SEQ ID NO: 474480 - DNA, 25 bp, Artificial
  probe
  misc_feature (1)..(25): SEQ ID NO: 7675; WAN024FHL; Start 267; Stop 291
caaaggtataaatgaggaaggtgac

SEQ ID NO: 474481 - DNA, 25 bp, Artificial
  probe
  misc_feature (1)..(25): SEQ ID NO: 7675; WAN024FHL; Start 264; Stop 288
tagcaaaggtataaatgaggaaggt

SEQ ID NO: 474482 - DNA, 25 bp, Artificial
  probe
  misc_feature (1)..(25): SEQ ID NO: 7675; WAN024FHL; Start 266; Stop 290
gcaaaggtataaatgaggaaggtga

SEQ ID NO: 474483 - DNA, 25 bp, Artificial
  probe
  misc_feature (1)..(25): SEQ ID NO: 7675; WAN024FHL; Start 265; Stop 289
agcaaaggtataaatgaggaaggtg

SEQ ID NO: 474484 - DNA, 25 bp, Artificial
  probe
  misc_feature (1)..(25): SEQ ID NO: 7675; WAN024FHL; Start 142; Stop 166
gatatagttggtcacaaaggcaaag

SEQ ID NO: 474485 - DNA, 25 bp, Artificial
  probe
  misc_feature (1)..(25): SEQ ID NO: 7675; WAN024FHL; Start 143; Stop 167
atatagttggtcacaaaggcaaaga

SEQ ID NO: 474486 - DNA, 25 bp, Artificial
  probe
  misc_feature (1)..(25): SEQ ID NO: 7675; WAN024FHL; Start 137; Stop 161
tatccgatatagttggtcacaaagg

SEQ ID NO: 474487 - DNA, 25 bp, Artificial
  probe
  misc_feature (1)..(25): SEQ ID NO: 7675; WAN024FHL; Start 121; Stop 145
attcatcttgccctcatatccgata

SEQ ID NO: 474488 - DNA, 25 bp, Artificial
  probe
  misc_feature (1)..(25): SEQ ID NO: 7675; WAN024FHL; Start 274; Stop 298
ataaatgaggaaggtgacgggatag

SEQ ID NO: 474489 - DNA, 25 bp, Artificial
  probe
  misc_feature (1)..(25): SEQ ID NO: 7675; WAN024FHL; Start 263; Stop 287
atagcaaaggtataaatgaggaagg

SEQ ID NO: 474490 - DNA, 25 bp, Artificial
  probe
  misc_feature (1)..(25): SEQ ID NO: 7675; WAN024FHL; Start 144; Stop 168
tatagttggtcacaaaggcaaagag

SEQ ID NO: 474491 - DNA, 25 bp, Artificial
  probe
  misc_feature (1)..(25): SEQ ID NO: 7675; WAN024FHL; Start 7; Stop 31
gctgaacgaaattgtaaatcaacca

SEQ ID NO: 474492 - DNA, 25 bp, Artificial
  probe
  misc_feature (1)..(25): SEQ ID NO: 7675; WAN024FHL; Start 124; Stop 148
catcttgccctcatatccgatatag

SEQ ID NO: 474493 - DNA, 25 bp, Artificial
  probe
  misc_feature (1)..(25): SEQ ID NO: 7675; WAN024FHL; Start 125; Stop 149
atcttgccctcatatccgatatagt

SEQ ID NO: 474494 - DNA, 25 bp, Artificial
  probe
  misc_feature (1)..(25): SEQ ID NO: 7675; WAN024FHL; Start 123; Stop 147
tcatcttgccctcatatccgatata

SEQ ID NO: 474495 - DNA, 25 bp, Artificial
  probe
  misc_feature (1)..(25): SEQ ID NO: 7675; WAN024FHL; Start 272; Stop 296
gtataaatgaggaaggtgacgggat

SEQ ID NO: 474496 - DNA, 25 bp, Artificial
  probe
  misc_feature (1)..(25): SEQ ID NO: 7675; WAN024FHL; Start 127; Stop 151
cttgccctcatatccgatatagttg

SEQ ID NO: 474497 - DNA, 25 bp, Artificial
  probe
  misc_feature (1)..(25): SEQ ID NO: 7675; WAN024FHL; Start 126; Stop 150
tcttgccctcatatccgatatagtt

SEQ ID NO: 474498 - DNA, 25 bp, Artificial
  probe
  misc_feature (1)..(25): SEQ ID NO: 7675; WAN024FHL; Start 8; Stop 32
ctgaacgaaattgtaaatcaaccaa

SEQ ID NO: 474499 - DNA, 25 bp, Artificial
  probe
  misc_feature (1)..(25): SEQ ID NO: 7675; WAN024FHL; Start 269; Stop 293
aaggtataaatgaggaaggtgacgg

SEQ ID NO: 474500 - DNA, 25 bp, Artificial
  probe
  misc_feature (1)..(25): SEQ ID NO: 7675; WAN024FHL; Start 131; Stop 155
ccctcatatccgatatagttggtca

SEQ ID NO: 474501 - DNA, 25 bp, Artificial
  probe
  misc_feature (1)..(25): SEQ ID NO: 7675; WAN024FHL; Start 141; Stop 165
cgatatagttggtcacaaaggcaaa

SEQ ID NO: 474502 - DNA, 25 bp, Artificial
  probe
  misc_feature (1)..(25): SEQ ID NO: 7675; WAN024FHL; Start 122; Stop 146
ttcatcttgccctcatatccgatat

SEQ ID NO: 474503 - DNA, 25 bp, Artificial
  probe
  misc_feature (1)..(25): SEQ ID NO: 7675; WAN024FHL; Start 322; Stop 346
aaggatataatcaatagcaccggac

SEQ ID NO: 474504 - DNA, 25 bp, Artificial
  probe
  misc_feature (1)..(25): SEQ ID NO: 7675; WAN024FHL; Start 321; Stop 345
caaggatataatcaatagcaccgga

SEQ ID NO: 474505 - DNA, 25 bp, Artificial
  probe
  misc_feature (1)..(25): SEQ ID NO: 7675; WAN024FHL; Start 324; Stop 348
ggatataatcaatagcaccggacaa

SEQ ID NO: 474506 - DNA, 25 bp, Artificial
  probe
  misc_feature (1)..(25): SEQ ID NO: 7676; WAN024CJI; Start 296; Stop 320
atgtatctattctcttaacctgcgt

SEQ ID NO: 474507 - DNA, 25 bp, Artificial
  probe
  misc_feature (1)..(25): SEQ ID NO: 7676; WAN024CJI; Start 297; Stop 321
tgtatctattctcttaacctgcgta

SEQ ID NO: 474508 - DNA, 25 bp, Artificial
  probe
  misc_feature (1)..(25): SEQ ID NO: 7676; WAN024CJI; Start 299; Stop 323
tatctattctcttaacctgcgtaca

SEQ ID NO: 474509 - DNA, 25 bp, Artificial
  probe
  misc_feature (1)..(25): SEQ ID NO: 7676; WAN024CJI; Start 295; Stop 319
catgtatctattctcttaacctgcg

SEQ ID NO: 474510 - DNA, 25 bp, Artificial
  probe
  misc_feature (1)..(25): SEQ ID NO: 7676; WAN024CJI; Start 298; Stop 322
gtatctattctcttaacctgcgtac

SEQ ID NO: 474511 - DNA, 25 bp, Artificial
  probe
  misc_feature (1)..(25): SEQ ID NO: 7676; WAN024CJI; Start 300; Stop 324
atctattctcttaacctgcgtacag

SEQ ID NO: 474512 - DNA, 25 bp, Artificial
  probe
  misc_feature (1)..(25): SEQ ID NO: 7676; WAN024CJI; Start 25; Stop 49
ggaagtagtagtatgaaacgagacg

SEQ ID NO: 474513 - DNA, 25 bp, Artificial
  probe
  misc_feature (1)..(25): SEQ ID NO: 7676; WAN024CJI; Start 24; Stop 48
aggaagtagtagtatgaaacgagac

SEQ ID NO: 474514 - DNA, 25 bp, Artificial
  probe
  misc_feature (1)..(25): SEQ ID NO: 7676; WAN024CJI; Start 111; Stop 135
gatgagagagcagggagatactaat

SEQ ID NO: 474515 - DNA, 25 bp, Artificial
  probe
  misc_feature (1)..(25): SEQ ID NO: 7676; WAN024CJI; Start 322; Stop 346
caggaattgattaaagaagttggca

SEQ ID NO: 474516 - DNA, 25 bp, Artificial
  probe
  misc_feature (1)..(25): SEQ ID NO: 7676; WAN024CJI; Start 321; Stop 345
acaggaattgattaaagaagttggc

SEQ ID NO: 474517 - DNA, 25 bp, Artificial
  probe
  misc_feature (1)..(25): SEQ ID NO: 7676; WAN024CJI; Start 112; Stop 136
atgagagagcagggagatactaatt

SEQ ID NO: 474518 - DNA, 25 bp, Artificial
  probe
  misc_feature (1)..(25): SEQ ID NO: 7676; WAN024CJI; Start 113; Stop 137
tgagagagcagggagatactaattt

SEQ ID NO: 474519 - DNA, 25 bp, Artificial
  probe
  misc_feature (1)..(25): SEQ ID NO: 7676; WAN024CJI; Start 20; Stop 44
ggaaaggaagtagtagtatgaaacg

SEQ ID NO: 474520 - DNA, 25 bp, Artificial
  probe
  misc_feature (1)..(25): SEQ ID NO: 7676; WAN024CJI; Start 352; Stop 376
attcctctcagtcaagacttccaag

SEQ ID NO: 474521 - DNA, 25 bp, Artificial
  probe
  misc_feature (1)..(25): SEQ ID NO: 7676; WAN024CJI; Start 186; Stop 210
gatagagatatggttcaccctttgg

SEQ ID NO: 474522 - DNA, 25 bp, Artificial
  probe
  misc_feature (1)..(25): SEQ ID NO: 7676; WAN024CJI; Start 185; Stop 209
agatagagatatggttcaccctttg

SEQ ID NO: 474523 - DNA, 25 bp, Artificial
  probe
  misc_feature (1)..(25): SEQ ID NO: 7676; WAN024CJI; Start 184; Stop 208
cagatagagatatggttcacccttt

SEQ ID NO: 474524 - DNA, 25 bp, Artificial
  probe
  misc_feature (1)..(25): SEQ ID NO: 7676; WAN024CJI; Start 64; Stop 88
aaacaatttcgcctaacagatgaag

SEQ ID NO: 474525 - DNA, 25 bp, Artificial
  probe
  misc_feature (1)..(25): SEQ ID NO: 7676; WAN024CJI; Start 183; Stop 207
acagatagagatatggttcaccctt

SEQ ID NO: 474526 - DNA, 25 bp, Artificial
  probe
  misc_feature (1)..(25): SEQ ID NO: 7676; WAN024CJI; Start 23; Stop 47
aaggaagtagtagtatgaaacgaga

SEQ ID NO: 474527 - DNA, 25 bp, Artificial
  probe
  misc_feature (1)..(25): SEQ ID NO: 7676; WAN024CJI; Start 181; Stop 205
aaacagatagagatatggttcaccc

SEQ ID NO: 474528 - DNA, 25 bp, Artificial
  probe
  misc_feature (1)..(25): SEQ ID NO: 7676; WAN024CJI; Start 65; Stop 89
aacaatttcgcctaacagatgaaga

SEQ ID NO: 474529 - DNA, 25 bp, Artificial
  probe
  misc_feature (1)..(25): SEQ ID NO: 7676; WAN024CJI; Start 351; Stop 375
cattcctctcagtcaagacttccaa

SEQ ID NO: 474530 - DNA, 25 bp, Artificial
  probe
  misc_feature (1)..(25): SEQ ID NO: 7676; WAN024CJI; Start 323; Stop 347
aggaattgattaaagaagttggcaa

SEQ ID NO: 474531 - DNA, 25 bp, Artificial
  probe
  misc_feature (1)..(25): SEQ ID NO: 7676; WAN024CJI; Start 345; Stop 369
caactccattcctctcagtcaagac

SEQ ID NO: 474532 - DNA, 25 bp, Artificial
  probe
  misc_feature (1)..(25): SEQ ID NO: 7676; WAN024CJI; Start 317; Stop 341
gcgtacaggaattgattaaagaagt

SEQ ID NO: 474533 - DNA, 25 bp, Artificial
  probe
  misc_feature (1)..(25): SEQ ID NO: 7676; WAN024CJI; Start 316; Stop 340
tgcgtacaggaattgattaaagaag

SEQ ID NO: 474534 - DNA, 25 bp, Artificial
  probe
  misc_feature (1)..(25): SEQ ID NO: 7676; WAN024CJI; Start 182; Stop 206
aacagatagagatatggttcaccct

SEQ ID NO: 474535 - DNA, 25 bp, Artificial
  probe
  misc_feature (1)..(25): SEQ ID NO: 7676; WAN024CJI; Start 348; Stop 372
ctccattcctctcagtcaagacttc

SEQ ID NO: 474536 - DNA, 25 bp, Artificial
  probe
  misc_feature (1)..(25): SEQ ID NO: 7676; WAN024CJI; Start 110; Stop 134
tgatgagagagcagggagatactaa

SEQ ID NO: 474537 - DNA, 25 bp, Artificial
  probe
  misc_feature (1)..(25): SEQ ID NO: 7676; WAN024CJI; Start 109; Stop 133
ttgatgagagagcagggagatacta

SEQ ID NO: 474538 - DNA, 25 bp, Artificial
  probe
  misc_feature (1)..(25): SEQ ID NO: 7676; WAN024CJI; Start 66; Stop 90
acaatttcgcctaacagatgaagag

SEQ ID NO: 474539 - DNA, 25 bp, Artificial
  probe
  misc_feature (1)..(25): SEQ ID NO: 7677; WAN024BLL; Start 87; Stop 111
atctggattagtgattgtaacaacg

SEQ ID NO: 474540 - DNA, 25 bp, Artificial
  probe
  misc_feature (1)..(25): SEQ ID NO: 7677; WAN024BLL; Start 85; Stop 109
ccatctggattagtgattgtaacaa

SEQ ID NO: 474541 - DNA, 25 bp, Artificial
  probe
  misc_feature (1)..(25): SEQ ID NO: 7677; WAN024BLL; Start 64; Stop 88
atcaccatttctgtcttacttccat

SEQ ID NO: 474542 - DNA, 25 bp, Artificial
  probe
  misc_feature (1)..(25): SEQ ID NO: 7677; WAN024BLL; Start 63; Stop 87
aatcaccatttctgtcttacttcca

SEQ ID NO: 474543 - DNA, 25 bp, Artificial
  probe
  misc_feature (1)..(25): SEQ ID NO: 7677; WAN024BLL; Start 67; Stop 91
accatttctgtcttacttccatctg

SEQ ID NO: 474544 - DNA, 25 bp, Artificial
  probe
  misc_feature (1)..(25): SEQ ID NO: 7677; WAN024BLL; Start 66; Stop 90
caccatttctgtcttacttccatct

SEQ ID NO: 474545 - DNA, 25 bp, Artificial
  probe
  misc_feature (1)..(25): SEQ ID NO: 7677; WAN024BLL; Start 65; Stop 89
tcaccatttctgtcttacttccatc

SEQ ID NO: 474546 - DNA, 25 bp, Artificial
  probe
  misc_feature (1)..(25): SEQ ID NO: 7677; WAN024BLL; Start 53; Stop 77
taccgtctttaatcaccatttctgt

SEQ ID NO: 474547 - DNA, 25 bp, Artificial
  probe
  misc_feature (1)..(25): SEQ ID NO: 7677; WAN024BLL; Start 56; Stop 80
cgtctttaatcaccatttctgtctt

SEQ ID NO: 474548 - DNA, 25 bp, Artificial
  probe
  misc_feature (1)..(25): SEQ ID NO: 7677; WAN024BLL; Start 86; Stop 110
catctggattagtgattgtaacaac

SEQ ID NO: 474549 - DNA, 25 bp, Artificial
  probe
  misc_feature (1)..(25): SEQ ID NO: 7677; WAN024BLL; Start 6; Stop 30
atttgatggtgttactggtttgtct

SEQ ID NO: 474550 - DNA, 25 bp, Artificial
  probe
  misc_feature (1)..(25): SEQ ID NO: 7677; WAN024BLL; Start 45; Stop 69
tccatctttaccgtctttaatcacc

SEQ ID NO: 474551 - DNA, 25 bp, Artificial
  probe
  misc_feature (1)..(25): SEQ ID NO: 7677; WAN024BLL; Start 52; Stop 76
ttaccgtctttaatcaccatttctg

SEQ ID NO: 474552 - DNA, 25 bp, Artificial
  probe
  misc_feature (1)..(25): SEQ ID NO: 7677; WAN024BLL; Start 47; Stop 71
catctttaccgtctttaatcaccat

SEQ ID NO: 474553 - DNA, 25 bp, Artificial
  probe
  misc_feature (1)..(25): SEQ ID NO: 7677; WAN024BLL; Start 46; Stop 70
ccatctttaccgtctttaatcacca

SEQ ID NO: 474554 - DNA, 25 bp, Artificial
  probe
  misc_feature (1)..(25): SEQ ID NO: 7677; WAN024BLL; Start 7; Stop 31
tttgatggtgttactggtttgtctt

SEQ ID NO: 474555 - DNA, 25 bp, Artificial
  probe
  misc_feature (1)..(25): SEQ ID NO: 7677; WAN024BLL; Start 44; Stop 68
ttccatctttaccgtctttaatcac

SEQ ID NO: 474556 - DNA, 25 bp, Artificial
  probe
  misc_feature (1)..(25): SEQ ID NO: 7677; WAN024BLL; Start 5; Stop 29
catttgatggtgttactggtttgtc

SEQ ID NO: 474557 - DNA, 25 bp, Artificial
  probe
  misc_feature (1)..(25): SEQ ID NO: 7677; WAN024BLL; Start 55; Stop 79
ccgtctttaatcaccatttctgtct

SEQ ID NO: 474558 - DNA, 25 bp, Artificial
  probe
  misc_feature (1)..(25): SEQ ID NO: 7677; WAN024BLL; Start 3; Stop 27
gtcatttgatggtgttactggtttg

SEQ ID NO: 474559 - DNA, 25 bp, Artificial
  probe
  misc_feature (1)..(25): SEQ ID NO: 7677; WAN024BLL; Start 75; Stop 99
tgtcttacttccatctggattagtg

SEQ ID NO: 474560 - DNA, 25 bp, Artificial
  probe
  misc_feature (1)..(25): SEQ ID NO: 7677; WAN024BLL; Start 54; Stop 78
accgtctttaatcaccatttctgtc

SEQ ID NO: 474561 - DNA, 25 bp, Artificial
  probe
  misc_feature (1)..(25): SEQ ID NO: 7677; WAN024BLL; Start 51; Stop 75
tttaccgtctttaatcaccatttct

SEQ ID NO: 474562 - DNA, 25 bp, Artificial
  probe
  misc_feature (1)..(25): SEQ ID NO: 7677; WAN024BLL; Start 49; Stop 73
tctttaccgtctttaatcaccattt

SEQ ID NO: 474563 - DNA, 25 bp, Artificial
  probe
  misc_feature (1)..(25): SEQ ID NO: 7677; WAN024BLL; Start 76; Stop 100
gtcttacttccatctggattagtga

SEQ ID NO: 474564 - DNA, 25 bp, Artificial
  probe
  misc_feature (1)..(25): SEQ ID NO: 7677; WAN024BLL; Start 74; Stop 98
ctgtcttacttccatctggattagt

SEQ ID NO: 474565 - DNA, 25 bp, Artificial
  probe
  misc_feature (1)..(25): SEQ ID NO: 7677; WAN024BLL; Start 62; Stop 86
taatcaccatttctgtcttacttcc

SEQ ID NO: 474566 - DNA, 25 bp, Artificial
  probe
  misc_feature (1)..(25): SEQ ID NO: 7677; WAN024BLL; Start 84; Stop 108
tccatctggattagtgattgtaaca

SEQ ID NO: 474567 - DNA, 25 bp, Artificial
  probe
  misc_feature (1)..(25): SEQ ID NO: 7677; WAN024BLL; Start 4; Stop 28
tcatttgatggtgttactggtttgt

SEQ ID NO: 474568 - DNA, 25 bp, Artificial
  probe
  misc_feature (1)..(25): SEQ ID NO: 7677; WAN024BLL; Start 2; Stop 26
tgtcatttgatggtgttactggttt

SEQ ID NO: 474569 - DNA, 25 bp, Artificial
  probe
  misc_feature (1)..(25): SEQ ID NO: 7677; WAN024BLL; Start 1; Stop 25
ttgtcatttgatggtgttactggtt

SEQ ID NO: 474570 - DNA, 25 bp, Artificial
  probe
  misc_feature (1)..(25): SEQ ID NO: 7677; WAN024BLL; Start 73; Stop 97
tctgtcttacttccatctggattag

SEQ ID NO: 474571 - DNA, 25 bp, Artificial
  probe
  misc_feature (1)..(25): SEQ ID NO: 7677; WAN024BLL; Start 8; Stop 32
ttgatggtgttactggtttgtcttg

SEQ ID NO: 474572 - DNA, 25 bp, Artificial
  probe
  misc_feature (1)..(25): SEQ ID NO: 7678; WAN024DW7; Start 39; Stop 63
ttctattgacgaatatcgaacagcg

SEQ ID NO: 474573 - DNA, 25 bp, Artificial
  probe
  misc_feature (1)..(25): SEQ ID NO: 7678; WAN024DW7; Start 75; Stop 99
tcacgttcaaatggcactaactaat

SEQ ID NO: 474574 - DNA, 25 bp, Artificial
  probe
  misc_feature (1)..(25): SEQ ID NO: 7678; WAN024DW7; Start 74; Stop 98
ttcacgttcaaatggcactaactaa

SEQ ID NO: 474575 - DNA, 25 bp, Artificial
  probe
  misc_feature (1)..(25): SEQ ID NO: 7678; WAN024DW7; Start 40; Stop 64
tctattgacgaatatcgaacagcga

SEQ ID NO: 474576 - DNA, 25 bp, Artificial
  probe
  misc_feature (1)..(25): SEQ ID NO: 7678; WAN024DW7; Start 73; Stop 97
cttcacgttcaaatggcactaacta

SEQ ID NO: 474577 - DNA, 25 bp, Artificial
  probe
  misc_feature (1)..(25): SEQ ID NO: 7678; WAN024DW7; Start 70; Stop 94
cttcttcacgttcaaatggcactaa

SEQ ID NO: 474578 - DNA, 25 bp, Artificial
  probe
  misc_feature (1)..(25): SEQ ID NO: 7678; WAN024DW7; Start 71; Stop 95
ttcttcacgttcaaatggcactaac

SEQ ID NO: 474579 - DNA, 25 bp, Artificial
  probe
  misc_feature (1)..(25): SEQ ID NO: 7678; WAN024DW7; Start 38; Stop 62
tttctattgacgaatatcgaacagc

SEQ ID NO: 474580 - DNA, 25 bp, Artificial
  probe
  misc_feature (1)..(25): SEQ ID NO: 7678; WAN024DW7; Start 69; Stop 93
acttcttcacgttcaaatggcacta

SEQ ID NO: 474581 - DNA, 25 bp, Artificial
  probe
  misc_feature (1)..(25): SEQ ID NO: 7678; WAN024DW7; Start 72; Stop 96
tcttcacgttcaaatggcactaact

SEQ ID NO: 474582 - DNA, 25 bp, Artificial
  probe
  misc_feature (1)..(25): SEQ ID NO: 7678; WAN024DW7; Start 54; Stop 78
tcgaacagcgattacacttcttcac

SEQ ID NO: 474583 - DNA, 25 bp, Artificial
  probe
  misc_feature (1)..(25): SEQ ID NO: 7678; WAN024DW7; Start 49; Stop 73
gaatatcgaacagcgattacacttc

SEQ ID NO: 474584 - DNA, 25 bp, Artificial
  probe
  misc_feature (1)..(25): SEQ ID NO: 7678; WAN024DW7; Start 51; Stop 75
atatcgaacagcgattacacttctt

SEQ ID NO: 474585 - DNA, 25 bp, Artificial
  probe
  misc_feature (1)..(25): SEQ ID NO: 7678; WAN024DW7; Start 50; Stop 74
aatatcgaacagcgattacacttct

SEQ ID NO: 474586 - DNA, 25 bp, Artificial
  probe
  misc_feature (1)..(25): SEQ ID NO: 7678; WAN024DW7; Start 43; Stop 67
attgacgaatatcgaacagcgatta

SEQ ID NO: 474587 - DNA, 25 bp, Artificial
  probe
  misc_feature (1)..(25): SEQ ID NO: 7678; WAN024DW7; Start 42; Stop 66
tattgacgaatatcgaacagcgatt

SEQ ID NO: 474588 - DNA, 25 bp, Artificial
  probe
  misc_feature (1)..(25): SEQ ID NO: 7678; WAN024DW7; Start 52; Stop 76
tatcgaacagcgattacacttcttc

SEQ ID NO: 474589 - DNA, 25 bp, Artificial
  probe
  misc_feature (1)..(25): SEQ ID NO: 7678; WAN024DW7; Start 41; Stop 65
ctattgacgaatatcgaacagcgat

SEQ ID NO: 474590 - DNA, 25 bp, Artificial
  probe
  misc_feature (1)..(25): SEQ ID NO: 7678; WAN024DW7; Start 48; Stop 72
cgaatatcgaacagcgattacactt

SEQ ID NO: 474591 - DNA, 25 bp, Artificial
  probe
  misc_feature (1)..(25): SEQ ID NO: 7678; WAN024DW7; Start 44; Stop 68
ttgacgaatatcgaacagcgattac

SEQ ID NO: 474592 - DNA, 25 bp, Artificial
  probe
  misc_feature (1)..(25): SEQ ID NO: 7678; WAN024DW7; Start 46; Stop 70
gacgaatatcgaacagcgattacac

SEQ ID NO: 474593 - DNA, 25 bp, Artificial
  probe
  misc_feature (1)..(25): SEQ ID NO: 7678; WAN024DW7; Start 47; Stop 71
acgaatatcgaacagcgattacact

SEQ ID NO: 474594 - DNA, 25 bp, Artificial
  probe
  misc_feature (1)..(25): SEQ ID NO: 7678; WAN024DW7; Start 45; Stop 69
tgacgaatatcgaacagcgattaca

SEQ ID NO: 474595 - DNA, 25 bp, Artificial
  probe
  misc_feature (1)..(25): SEQ ID NO: 7678; WAN024DW7; Start 68; Stop 92
cacttcttcacgttcaaatggcact

SEQ ID NO: 474596 - DNA, 25 bp, Artificial
  probe
  misc_feature (1)..(25): SEQ ID NO: 7678; WAN024DW7; Start 53; Stop 77
atcgaacagcgattacacttcttca

SEQ ID NO: 474597 - DNA, 25 bp, Artificial
  probe
  misc_feature (1)..(25): SEQ ID NO: 7678; WAN024DW7; Start 67; Stop 91
acacttcttcacgttcaaatggcac

SEQ ID NO: 474598 - DNA, 25 bp, Artificial
  probe
  misc_feature (1)..(25): SEQ ID NO: 7678; WAN024DW7; Start 37; Stop 61
ttttctattgacgaatatcgaacag

SEQ ID NO: 474599 - DNA, 25 bp, Artificial
  probe
  misc_feature (1)..(25): SEQ ID NO: 7678; WAN024DW7; Start 36; Stop 60
attttctattgacgaatatcgaaca

SEQ ID NO: 474600 - DNA, 25 bp, Artificial
  probe
  misc_feature (1)..(25): SEQ ID NO: 7678; WAN024DW7; Start 34; Stop 58
acattttctattgacgaatatcgaa

SEQ ID NO: 474601 - DNA, 25 bp, Artificial
  probe
  misc_feature (1)..(25): SEQ ID NO: 7678; WAN024DW7; Start 35; Stop 59
cattttctattgacgaatatcgaac

SEQ ID NO: 474602 - DNA, 25 bp, Artificial
  probe
  misc_feature (1)..(25): SEQ ID NO: 7678; WAN024DW7; Start 33; Stop 57
tacattttctattgacgaatatcga

SEQ ID NO: 474603 - DNA, 25 bp, Artificial
  probe
  misc_feature (1)..(25): SEQ ID NO: 7678; WAN024DW7; Start 32; Stop 56
ttacattttctattgacgaatatcg

SEQ ID NO: 474604 - DNA, 25 bp, Artificial
  probe
  misc_feature (1)..(25): SEQ ID NO: 7679; WAN024E23; Start 40; Stop 64
attcttgacatcgttaccctcttac

SEQ ID NO: 474605 - DNA, 25 bp, Artificial
  probe
  misc_feature (1)..(25): SEQ ID NO: 7679; WAN024E23; Start 39; Stop 63
aattcttgacatcgttaccctctta

SEQ ID NO: 474606 - DNA, 25 bp, Artificial
  probe
  misc_feature (1)..(25): SEQ ID NO: 7679; WAN024E23; Start 41; Stop 65
ttcttgacatcgttaccctcttaca

SEQ ID NO: 474607 - DNA, 25 bp, Artificial
  probe
  misc_feature (1)..(25): SEQ ID NO: 7679; WAN024E23; Start 43; Stop 67
cttgacatcgttaccctcttacaaa

SEQ ID NO: 474608 - DNA, 25 bp, Artificial
  probe
  misc_feature (1)..(25): SEQ ID NO: 7679; WAN024E23; Start 38; Stop 62
caattcttgacatcgttaccctctt

SEQ ID NO: 474609 - DNA, 25 bp, Artificial
  probe
  misc_feature (1)..(25): SEQ ID NO: 7679; WAN024E23; Start 42; Stop 66
tcttgacatcgttaccctcttacaa

SEQ ID NO: 474610 - DNA, 25 bp, Artificial
  probe
  misc_feature (1)..(25): SEQ ID NO: 7679; WAN024E23; Start 45; Stop 69
tgacatcgttaccctcttacaaaat

SEQ ID NO: 474611 - DNA, 25 bp, Artificial
  probe
  misc_feature (1)..(25): SEQ ID NO: 7679; WAN024E23; Start 46; Stop 70
gacatcgttaccctcttacaaaatt

SEQ ID NO: 474612 - DNA, 25 bp, Artificial
  probe
  misc_feature (1)..(25): SEQ ID NO: 7679; WAN024E23; Start 34; Stop 58
aattcaattcttgacatcgttaccc

SEQ ID NO: 474613 - DNA, 25 bp, Artificial
  probe
  misc_feature (1)..(25): SEQ ID NO: 7679; WAN024E23; Start 44; Stop 68
ttgacatcgttaccctcttacaaaa

SEQ ID NO: 474614 - DNA, 25 bp, Artificial
  probe
  misc_feature (1)..(25): SEQ ID NO: 7679; WAN024E23; Start 35; Stop 59
attcaattcttgacatcgttaccct

SEQ ID NO: 474615 - DNA, 25 bp, Artificial
  probe
  misc_feature (1)..(25): SEQ ID NO: 7679; WAN024E23; Start 36; Stop 60
ttcaattcttgacatcgttaccctc

SEQ ID NO: 474616 - DNA, 25 bp, Artificial
  probe
  misc_feature (1)..(25): SEQ ID NO: 7679; WAN024E23; Start 33; Stop 57
aaattcaattcttgacatcgttacc

SEQ ID NO: 474617 - DNA, 25 bp, Artificial
  probe
  misc_feature (1)..(25): SEQ ID NO: 7679; WAN024E23; Start 37; Stop 61
tcaattcttgacatcgttaccctct

SEQ ID NO: 474618 - DNA, 25 bp, Artificial
  probe
  misc_feature (1)..(25): SEQ ID NO: 7679; WAN024E23; Start 50; Stop 74
tcgttaccctcttacaaaatttcaa

SEQ ID NO: 474619 - DNA, 25 bp, Artificial
  probe
  misc_feature (1)..(25): SEQ ID NO: 7679; WAN024E23; Start 47; Stop 71
acatcgttaccctcttacaaaattt

SEQ ID NO: 474620 - DNA, 25 bp, Artificial
  probe
  misc_feature (1)..(25): SEQ ID NO: 7679; WAN024E23; Start 49; Stop 73
atcgttaccctcttacaaaatttca

SEQ ID NO: 474621 - DNA, 25 bp, Artificial
  probe
  misc_feature (1)..(25): SEQ ID NO: 7679; WAN024E23; Start 48; Stop 72
catcgttaccctcttacaaaatttc

SEQ ID NO: 474622 - DNA, 25 bp, Artificial
  probe
  misc_feature (1)..(25): SEQ ID NO: 7679; WAN024E23; Start 20; Stop 44
tcaaagatggtgaaaattcaattct

SEQ ID NO: 474623 - DNA, 25 bp, Artificial
  probe
  misc_feature (1)..(25): SEQ ID NO: 7679; WAN024E23; Start 51; Stop 75
cgttaccctcttacaaaatttcaat

SEQ ID NO: 474624 - DNA, 25 bp, Artificial
  probe
  misc_feature (1)..(25): SEQ ID NO: 7679; WAN024E23; Start 28; Stop 52
ggtgaaaattcaattcttgacatcg

SEQ ID NO: 474625 - DNA, 25 bp, Artificial
  probe
  misc_feature (1)..(25): SEQ ID NO: 7679; WAN024E23; Start 29; Stop 53
gtgaaaattcaattcttgacatcgt

SEQ ID NO: 474626 - DNA, 25 bp, Artificial
  probe
  misc_feature (1)..(25): SEQ ID NO: 7679; WAN024E23; Start 15; Stop 39
ggtcatcaaagatggtgaaaattca

SEQ ID NO: 474627 - DNA, 25 bp, Artificial
  probe
  misc_feature (1)..(25): SEQ ID NO: 7679; WAN024E23; Start 14; Stop 38
tggtcatcaaagatggtgaaaattc

SEQ ID NO: 474628 - DNA, 25 bp, Artificial
  probe
  misc_feature (1)..(25): SEQ ID NO: 7679; WAN024E23; Start 13; Stop 37
atggtcatcaaagatggtgaaaatt

SEQ ID NO: 474629 - DNA, 25 bp, Artificial
  probe
  misc_feature (1)..(25): SEQ ID NO: 7679; WAN024E23; Start 19; Stop 43
atcaaagatggtgaaaattcaattc

SEQ ID NO: 474630 - DNA, 25 bp, Artificial
  probe
  misc_feature (1)..(25): SEQ ID NO: 7679; WAN024E23; Start 12; Stop 36
catggtcatcaaagatggtgaaaat

SEQ ID NO: 474631 - DNA, 25 bp, Artificial
  probe
  misc_feature (1)..(25): SEQ ID NO: 7679; WAN024E23; Start 27; Stop 51
tggtgaaaattcaattcttgacatc

SEQ ID NO: 474632 - DNA, 25 bp, Artificial
  probe
  misc_feature (1)..(25): SEQ ID NO: 7679; WAN024E23; Start 25; Stop 49
gatggtgaaaattcaattcttgaca

SEQ ID NO: 474633 - DNA, 25 bp, Artificial
  probe
  misc_feature (1)..(25): SEQ ID NO: 7679; WAN024E23; Start 30; Stop 54
tgaaaattcaattcttgacatcgtt

SEQ ID NO: 474634 - DNA, 25 bp, Artificial
  probe
  misc_feature (1)..(25): SEQ ID NO: 7679; WAN024E23; Start 24; Stop 48
agatggtgaaaattcaattcttgac

SEQ ID NO: 474635 - DNA, 25 bp, Artificial
  probe
  misc_feature (1)..(25): SEQ ID NO: 7679; WAN024E23; Start 16; Stop 40
gtcatcaaagatggtgaaaattcaa

SEQ ID NO: 474636 - DNA, 25 bp, Artificial
  probe
  misc_feature (1)..(25): SEQ ID NO: 7679; WAN024E23; Start 26; Stop 50
atggtgaaaattcaattcttgacat

SEQ ID NO: 474637 - DNA, 25 bp, Artificial
  probe
  misc_feature (1)..(25): SEQ ID NO: 7680; WAN024CSX; Start 264; Stop 288
gtctgctactctgtcttcttgtaat

SEQ ID NO: 474638 - DNA, 25 bp, Artificial
  probe
  misc_feature (1)..(25): SEQ ID NO: 7680; WAN024CSX; Start 267; Stop 291
tgctactctgtcttcttgtaattga

SEQ ID NO: 474639 - DNA, 25 bp, Artificial
  probe
  misc_feature (1)..(25): SEQ ID NO: 7680; WAN024CSX; Start 266; Stop 290
ctgctactctgtcttcttgtaattg

SEQ ID NO: 474640 - DNA, 25 bp, Artificial
  probe
  misc_feature (1)..(25): SEQ ID NO: 7680; WAN024CSX; Start 265; Stop 289
tctgctactctgtcttcttgtaatt

SEQ ID NO: 474641 - DNA, 25 bp, Artificial
  probe
  misc_feature (1)..(25): SEQ ID NO: 7680; WAN024CSX; Start 194; Stop 218
agcaccttagttacttcctcttatt

SEQ ID NO: 474642 - DNA, 25 bp, Artificial
  probe
  misc_feature (1)..(25): SEQ ID NO: 7680; WAN024CSX; Start 193; Stop 217
aagcaccttagttacttcctcttat

SEQ ID NO: 474643 - DNA, 25 bp, Artificial
  probe
  misc_feature (1)..(25): SEQ ID NO: 7680; WAN024CSX; Start 263; Stop 287
ggtctgctactctgtcttcttgtaa

SEQ ID NO: 474644 - DNA, 25 bp, Artificial
  probe
  misc_feature (1)..(25): SEQ ID NO: 7680; WAN024CSX; Start 262; Stop 286
tggtctgctactctgtcttcttgta

SEQ ID NO: 474645 - DNA, 25 bp, Artificial
  probe
  misc_feature (1)..(25): SEQ ID NO: 7680; WAN024CSX; Start 207; Stop 231
cttcctcttatttatttcgccagta

SEQ ID NO: 474646 - DNA, 25 bp, Artificial
  probe
  misc_feature (1)..(25): SEQ ID NO: 7680; WAN024CSX; Start 205; Stop 229
tacttcctcttatttatttcgccag

SEQ ID NO: 474647 - DNA, 25 bp, Artificial
  probe
  misc_feature (1)..(25): SEQ ID NO: 7680; WAN024CSX; Start 192; Stop 216
aaagcaccttagttacttcctctta

SEQ ID NO: 474648 - DNA, 25 bp, Artificial
  probe
  misc_feature (1)..(25): SEQ ID NO: 7680; WAN024CSX; Start 191; Stop 215
taaagcaccttagttacttcctctt

SEQ ID NO: 474649 - DNA, 25 bp, Artificial
  probe
  misc_feature (1)..(25): SEQ ID NO: 7680; WAN024CSX; Start 213; Stop 237
cttatttatttcgccagtaaacgga

SEQ ID NO: 474650 - DNA, 25 bp, Artificial
  probe
  misc_feature (1)..(25): SEQ ID NO: 7680; WAN024CSX; Start 212; Stop 236
tcttatttatttcgccagtaaacgg

SEQ ID NO: 474651 - DNA, 25 bp, Artificial
  probe
  misc_feature (1)..(25): SEQ ID NO: 7680; WAN024CSX; Start 206; Stop 230
acttcctcttatttatttcgccagt

SEQ ID NO: 474652 - DNA, 25 bp, Artificial
  probe
  misc_feature (1)..(25): SEQ ID NO: 7680; WAN024CSX; Start 236; Stop 260
gatctactgactcgaataacgtgag

SEQ ID NO: 474653 - DNA, 25 bp, Artificial
  probe
  misc_feature (1)..(25): SEQ ID NO: 7680; WAN024CSX; Start 214; Stop 238
ttatttatttcgccagtaaacggat

SEQ ID NO: 474654 - DNA, 25 bp, Artificial
  probe
  misc_feature (1)..(25): SEQ ID NO: 7680; WAN024CSX; Start 235; Stop 259
ggatctactgactcgaataacgtga

SEQ ID NO: 474655 - DNA, 25 bp, Artificial
  probe
  misc_feature (1)..(25): SEQ ID NO: 7680; WAN024CSX; Start 195; Stop 219
gcaccttagttacttcctcttattt

SEQ ID NO: 474656 - DNA, 25 bp, Artificial
  probe
  misc_feature (1)..(25): SEQ ID NO: 7680; WAN024CSX; Start 208; Stop 232
ttcctcttatttatttcgccagtaa

SEQ ID NO: 474657 - DNA, 25 bp, Artificial
  probe
  misc_feature (1)..(25): SEQ ID NO: 7680; WAN024CSX; Start 204; Stop 228
ttacttcctcttatttatttcgcca

SEQ ID NO: 474658 - DNA, 25 bp, Artificial
  probe
  misc_feature (1)..(25): SEQ ID NO: 7680; WAN024CSX; Start 232; Stop 256
aacggatctactgactcgaataacg

SEQ ID NO: 474659 - DNA, 25 bp, Artificial
  probe
  misc_feature (1)..(25): SEQ ID NO: 7680; WAN024CSX; Start 211; Stop 235
ctcttatttatttcgccagtaaacg

SEQ ID NO: 474660 - DNA, 25 bp, Artificial
  probe
  misc_feature (1)..(25): SEQ ID NO: 7680; WAN024CSX; Start 218; Stop 242
ttatttcgccagtaaacggatctac

SEQ ID NO: 474661 - DNA, 25 bp, Artificial
  probe
  misc_feature (1)..(25): SEQ ID NO: 7680; WAN024CSX; Start 203; Stop 227
gttacttcctcttatttatttcgcc

SEQ ID NO: 474662 - DNA, 25 bp, Artificial
  probe
  misc_feature (1)..(25): SEQ ID NO: 7680; WAN024CSX; Start 217; Stop 241
tttatttcgccagtaaacggatcta

SEQ ID NO: 474663 - DNA, 25 bp, Artificial
  probe
  misc_feature (1)..(25): SEQ ID NO: 7680; WAN024CSX; Start 215; Stop 239
tatttatttcgccagtaaacggatc

SEQ ID NO: 474664 - DNA, 25 bp, Artificial
  probe
  misc_feature (1)..(25): SEQ ID NO: 7680; WAN024CSX; Start 190; Stop 214
ctaaagcaccttagttacttcctct

SEQ ID NO: 474665 - DNA, 25 bp, Artificial
  probe
  misc_feature (1)..(25): SEQ ID NO: 7680; WAN024CSX; Start 210; Stop 234
cctcttatttatttcgccagtaaac

SEQ ID NO: 474666 - DNA, 25 bp, Artificial
  probe
  misc_feature (1)..(25): SEQ ID NO: 7680; WAN024CSX; Start 209; Stop 233
tcctcttatttatttcgccagtaaa

SEQ ID NO: 474667 - DNA, 25 bp, Artificial
  probe
  misc_feature (1)..(25): SEQ ID NO: 7680; WAN024CSX; Start 216; Stop 240
atttatttcgccagtaaacggatct

SEQ ID NO: 474668 - DNA, 25 bp, Artificial
  probe
  misc_feature (1)..(25): SEQ ID NO: 7680; WAN024CSX; Start 261; Stop 285
ctggtctgctactctgtcttcttgt

SEQ ID NO: 474669 - DNA, 25 bp, Artificial
  probe
  misc_feature (1)..(25): SEQ ID NO: 7680; WAN024CSX; Start 229; Stop 253
gtaaacggatctactgactcgaata

SEQ ID NO: 474670 - DNA, 25 bp, Artificial
  probe
  misc_feature (1)..(25): SEQ ID NO: 7681; WAN024ERA; Start 197; Stop 221
taatttggcaacaacttcgtcatta

SEQ ID NO: 474671 - DNA, 25 bp, Artificial
  probe
  misc_feature (1)..(25): SEQ ID NO: 7681; WAN024ERA; Start 196; Stop 220
ctaatttggcaacaacttcgtcatt

SEQ ID NO: 474672 - DNA, 25 bp, Artificial
  probe
  misc_feature (1)..(25): SEQ ID NO: 7681; WAN024ERA; Start 238; Stop 262
agagtgataaggtcttcaaatgctc

SEQ ID NO: 474673 - DNA, 25 bp, Artificial
  probe
  misc_feature (1)..(25): SEQ ID NO: 7681; WAN024ERA; Start 198; Stop 222
aatttggcaacaacttcgtcattac

SEQ ID NO: 474674 - DNA, 25 bp, Artificial
  probe
  misc_feature (1)..(25): SEQ ID NO: 7681; WAN024ERA; Start 193; Stop 217
gaactaatttggcaacaacttcgtc

SEQ ID NO: 474675 - DNA, 25 bp, Artificial
  probe
  misc_feature (1)..(25): SEQ ID NO: 7681; WAN024ERA; Start 239; Stop 263
gagtgataaggtcttcaaatgctcc

SEQ ID NO: 474676 - DNA, 25 bp, Artificial
  probe
  misc_feature (1)..(25): SEQ ID NO: 7681; WAN024ERA; Start 195; Stop 219
actaatttggcaacaacttcgtcat

SEQ ID NO: 474677 - DNA, 25 bp, Artificial
  probe
  misc_feature (1)..(25): SEQ ID NO: 7681; WAN024ERA; Start 37; Stop 61
ctacctttgcggcattctctaattt

SEQ ID NO: 474678 - DNA, 25 bp, Artificial
  probe
  misc_feature (1)..(25): SEQ ID NO: 7681; WAN024ERA; Start 194; Stop 218
aactaatttggcaacaacttcgtca

SEQ ID NO: 474679 - DNA, 25 bp, Artificial
  probe
  misc_feature (1)..(25): SEQ ID NO: 7681; WAN024ERA; Start 243; Stop 267
gataaggtcttcaaatgctccctag

SEQ ID NO: 474680 - DNA, 25 bp, Artificial
  probe
  misc_feature (1)..(25): SEQ ID NO: 7681; WAN024ERA; Start 242; Stop 266
tgataaggtcttcaaatgctcccta

SEQ ID NO: 474681 - DNA, 25 bp, Artificial
  probe
  misc_feature (1)..(25): SEQ ID NO: 7681; WAN024ERA; Start 199; Stop 223
atttggcaacaacttcgtcattacc

SEQ ID NO: 474682 - DNA, 25 bp, Artificial
  probe
  misc_feature (1)..(25): SEQ ID NO: 7681; WAN024ERA; Start 240; Stop 264
agtgataaggtcttcaaatgctccc

SEQ ID NO: 474683 - DNA, 25 bp, Artificial
  probe
  misc_feature (1)..(25): SEQ ID NO: 7681; WAN024ERA; Start 179; Stop 203
agatgtctgagcccgaactaatttg

SEQ ID NO: 474684 - DNA, 25 bp, Artificial
  probe
  misc_feature (1)..(25): SEQ ID NO: 7681; WAN024ERA; Start 237; Stop 261
aagagtgataaggtcttcaaatgct

SEQ ID NO: 474685 - DNA, 25 bp, Artificial
  probe
  misc_feature (1)..(25): SEQ ID NO: 7681; WAN024ERA; Start 236; Stop 260
aaagagtgataaggtcttcaaatgc

SEQ ID NO: 474686 - DNA, 25 bp, Artificial
  probe
  misc_feature (1)..(25): SEQ ID NO: 7681; WAN024ERA; Start 234; Stop 258
gcaaagagtgataaggtcttcaaat

SEQ ID NO: 474687 - DNA, 25 bp, Artificial
  probe
  misc_feature (1)..(25): SEQ ID NO: 7681; WAN024ERA; Start 233; Stop 257
agcaaagagtgataaggtcttcaaa

SEQ ID NO: 474688 - DNA, 25 bp, Artificial
  probe
  misc_feature (1)..(25): SEQ ID NO: 7681; WAN024ERA; Start 232; Stop 256
gagcaaagagtgataaggtcttcaa

SEQ ID NO: 474689 - DNA, 25 bp, Artificial
  probe
  misc_feature (1)..(25): SEQ ID NO: 7681; WAN024ERA; Start 228; Stop 252
tttcgagcaaagagtgataaggtct

SEQ ID NO: 474690 - DNA, 25 bp, Artificial
  probe
  misc_feature (1)..(25): SEQ ID NO: 7681; WAN024ERA; Start 190; Stop 214
cccgaactaatttggcaacaacttc

SEQ ID NO: 474691 - DNA, 25 bp, Artificial
  probe
  misc_feature (1)..(25): SEQ ID NO: 7681; WAN024ERA; Start 241; Stop 265
gtgataaggtcttcaaatgctccct

SEQ ID NO: 474692 - DNA, 25 bp, Artificial
  probe
  misc_feature (1)..(25): SEQ ID NO: 7681; WAN024ERA; Start 112; Stop 136
caacaattttcatacggataccctc

SEQ ID NO: 474693 - DNA, 25 bp, Artificial
  probe
  misc_feature (1)..(25): SEQ ID NO: 7681; WAN024ERA; Start 108; Stop 132
acaccaacaattttcatacggatac

SEQ ID NO: 474694 - DNA, 25 bp, Artificial
  probe
  misc_feature (1)..(25): SEQ ID NO: 7681; WAN024ERA; Start 6; Stop 30
ccctgagtctcaacatgaatcacat

SEQ ID NO: 474695 - DNA, 25 bp, Artificial
  probe
  misc_feature (1)..(25): SEQ ID NO: 7681; WAN024ERA; Start 109; Stop 133
caccaacaattttcatacggatacc

SEQ ID NO: 474696 - DNA, 25 bp, Artificial
  probe
  misc_feature (1)..(25): SEQ ID NO: 7681; WAN024ERA; Start 106; Stop 130
caacaccaacaattttcatacggat

SEQ ID NO: 474697 - DNA, 25 bp, Artificial
  probe
  misc_feature (1)..(25): SEQ ID NO: 7681; WAN024ERA; Start 7; Stop 31
cctgagtctcaacatgaatcacatg

SEQ ID NO: 474698 - DNA, 25 bp, Artificial
  probe
  misc_feature (1)..(25): SEQ ID NO: 7681; WAN024ERA; Start 107; Stop 131
aacaccaacaattttcatacggata

SEQ ID NO: 474699 - DNA, 25 bp, Artificial
  probe
  misc_feature (1)..(25): SEQ ID NO: 7681; WAN024ERA; Start 111; Stop 135
ccaacaattttcatacggataccct

SEQ ID NO: 474700 - DNA, 25 bp, Artificial
  probe
  misc_feature (1)..(25): SEQ ID NO: 7681; WAN024ERA; Start 235; Stop 259
caaagagtgataaggtcttcaaatg

SEQ ID NO: 474701 - DNA, 25 bp, Artificial
  probe
  misc_feature (1)..(25): SEQ ID NO: 7681; WAN024ERA; Start 110; Stop 134
accaacaattttcatacggataccc

SEQ ID NO: 474702 - DNA, 25 bp, Artificial
  probe
  misc_feature (1)..(25): SEQ ID NO: 7681; WAN024ERA; Start 180; Stop 204
gatgtctgagcccgaactaatttgg

SEQ ID NO: 474703 - DNA, 25 bp, Artificial
  probe
  misc_feature (1)..(25): SEQ ID NO: 7682; WAN024CQW; Start 201; Stop 225
caataactcgttgacctgtgattaa

SEQ ID NO: 474704 - DNA, 25 bp, Artificial
  probe
  misc_feature (1)..(25): SEQ ID NO: 7682; WAN024CQW; Start 8; Stop 32
gtattagggtcaatcaactcaggaa

SEQ ID NO: 474705 - DNA, 25 bp, Artificial
  probe
  misc_feature (1)..(25): SEQ ID NO: 7682; WAN024CQW; Start 69; Stop 93
ctccacaaccgacataaataacaat

SEQ ID NO: 474706 - DNA, 25 bp, Artificial
  probe
  misc_feature (1)..(25): SEQ ID NO: 7682; WAN024CQW; Start 68; Stop 92
tctccacaaccgacataaataacaa

SEQ ID NO: 474707 - DNA, 25 bp, Artificial
  probe
  misc_feature (1)..(25): SEQ ID NO: 7682; WAN024CQW; Start 67; Stop 91
ttctccacaaccgacataaataaca

SEQ ID NO: 474708 - DNA, 25 bp, Artificial
  probe
  misc_feature (1)..(25): SEQ ID NO: 7682; WAN024CQW; Start 9; Stop 33
tattagggtcaatcaactcaggaaa

SEQ ID NO: 474709 - DNA, 25 bp, Artificial
  probe
  misc_feature (1)..(25): SEQ ID NO: 7682; WAN024CQW; Start 10; Stop 34
attagggtcaatcaactcaggaaac

SEQ ID NO: 474710 - DNA, 25 bp, Artificial
  probe
  misc_feature (1)..(25): SEQ ID NO: 7682; WAN024CQW; Start 18; Stop 42
caatcaactcaggaaactcattcag

SEQ ID NO: 474711 - DNA, 25 bp, Artificial
  probe
  misc_feature (1)..(25): SEQ ID NO: 7682; WAN024CQW; Start 16; Stop 40
gtcaatcaactcaggaaactcattc

SEQ ID NO: 474712 - DNA, 25 bp, Artificial
  probe
  misc_feature (1)..(25): SEQ ID NO: 7682; WAN024CQW; Start 17; Stop 41
tcaatcaactcaggaaactcattca

SEQ ID NO: 474713 - DNA, 25 bp, Artificial
  probe
  misc_feature (1)..(25): SEQ ID NO: 7682; WAN024CQW; Start 66; Stop 90
gttctccacaaccgacataaataac

SEQ ID NO: 474714 - DNA, 25 bp, Artificial
  probe
  misc_feature (1)..(25): SEQ ID NO: 7682; WAN024CQW; Start 15; Stop 39
ggtcaatcaactcaggaaactcatt

SEQ ID NO: 474715 - DNA, 25 bp, Artificial
  probe
  misc_feature (1)..(25): SEQ ID NO: 7682; WAN024CQW; Start 70; Stop 94
tccacaaccgacataaataacaata

SEQ ID NO: 474716 - DNA, 25 bp, Artificial
  probe
  misc_feature (1)..(25): SEQ ID NO: 7682; WAN024CQW; Start 11; Stop 35
ttagggtcaatcaactcaggaaact

SEQ ID NO: 474717 - DNA, 25 bp, Artificial
  probe
  misc_feature (1)..(25): SEQ ID NO: 7682; WAN024CQW; Start 7; Stop 31
ggtattagggtcaatcaactcagga

SEQ ID NO: 474718 - DNA, 25 bp, Artificial
  probe
  misc_feature (1)..(25): SEQ ID NO: 7682; WAN024CQW; Start 19; Stop 43
aatcaactcaggaaactcattcagt

SEQ ID NO: 474719 - DNA, 25 bp, Artificial
  probe
  misc_feature (1)..(25): SEQ ID NO: 7682; WAN024CQW; Start 20; Stop 44
atcaactcaggaaactcattcagta

SEQ ID NO: 474720 - DNA, 25 bp, Artificial
  probe
  misc_feature (1)..(25): SEQ ID NO: 7682; WAN024CQW; Start 38; Stop 62
ttcagtacatccgtcatttcatttc

SEQ ID NO: 474721 - DNA, 25 bp, Artificial
  probe
  misc_feature (1)..(25): SEQ ID NO: 7682; WAN024CQW; Start 36; Stop 60
cattcagtacatccgtcatttcatt

SEQ ID NO: 474722 - DNA, 25 bp, Artificial
  probe
  misc_feature (1)..(25): SEQ ID NO: 7682; WAN024CQW; Start 35; Stop 59
tcattcagtacatccgtcatttcat

SEQ ID NO: 474723 - DNA, 25 bp, Artificial
  probe
  misc_feature (1)..(25): SEQ ID NO: 7682; WAN024CQW; Start 65; Stop 89
cgttctccacaaccgacataaataa

SEQ ID NO: 474724 - DNA, 25 bp, Artificial
  probe
  misc_feature (1)..(25): SEQ ID NO: 7682; WAN024CQW; Start 37; Stop 61
attcagtacatccgtcatttcattt

SEQ ID NO: 474725 - DNA, 25 bp, Artificial
  probe
  misc_feature (1)..(25): SEQ ID NO: 7682; WAN024CQW; Start 34; Stop 58
ctcattcagtacatccgtcatttca

SEQ ID NO: 474726 - DNA, 25 bp, Artificial
  probe
  misc_feature (1)..(25): SEQ ID NO: 7682; WAN024CQW; Start 12; Stop 36
tagggtcaatcaactcaggaaactc

SEQ ID NO: 474727 - DNA, 25 bp, Artificial
  probe
  misc_feature (1)..(25): SEQ ID NO: 7682; WAN024CQW; Start 39; Stop 63
tcagtacatccgtcatttcatttcc

SEQ ID NO: 474728 - DNA, 25 bp, Artificial
  probe
  misc_feature (1)..(25): SEQ ID NO: 7682; WAN024CQW; Start 41; Stop 65
agtacatccgtcatttcatttccac

SEQ ID NO: 474729 - DNA, 25 bp, Artificial
  probe
  misc_feature (1)..(25): SEQ ID NO: 7682; WAN024CQW; Start 23; Stop 47
aactcaggaaactcattcagtacat

SEQ ID NO: 474730 - DNA, 25 bp, Artificial
  probe
  misc_feature (1)..(25): SEQ ID NO: 7682; WAN024CQW; Start 24; Stop 48
actcaggaaactcattcagtacatc

SEQ ID NO: 474731 - DNA, 25 bp, Artificial
  probe
  misc_feature (1)..(25): SEQ ID NO: 7682; WAN024CQW; Start 40; Stop 64
cagtacatccgtcatttcatttcca

SEQ ID NO: 474732 - DNA, 25 bp, Artificial
  probe
  misc_feature (1)..(25): SEQ ID NO: 7682; WAN024CQW; Start 32; Stop 56
aactcattcagtacatccgtcattt

SEQ ID NO: 474733 - DNA, 25 bp, Artificial
  probe
  misc_feature (1)..(25): SEQ ID NO: 7682; WAN024CQW; Start 31; Stop 55
aaactcattcagtacatccgtcatt

SEQ ID NO: 474734 - DNA, 25 bp, Artificial
  probe
  misc_feature (1)..(25): SEQ ID NO: 7682; WAN024CQW; Start 21; Stop 45
tcaactcaggaaactcattcagtac

SEQ ID NO: 474735 - DNA, 25 bp, Artificial
  probe
  misc_feature (1)..(25): SEQ ID NO: 7682; WAN024CQW; Start 200; Stop 224
tcaataactcgttgacctgtgatta

SEQ ID NO: 474736 - DNA, 25 bp, Artificial
  probe
  misc_feature (1)..(25): SEQ ID NO: 7683; WAN024BBJ; Start 231; Stop 255
caaggtaaggaaggtcatcggatac

SEQ ID NO: 474737 - DNA, 25 bp, Artificial
  probe
  misc_feature (1)..(25): SEQ ID NO: 7683; WAN024BBJ; Start 230; Stop 254
tcaaggtaaggaaggtcatcggata

SEQ ID NO: 474738 - DNA, 25 bp, Artificial
  probe
  misc_feature (1)..(25): SEQ ID NO: 7683; WAN024BBJ; Start 232; Stop 256
aaggtaaggaaggtcatcggatact

SEQ ID NO: 474739 - DNA, 25 bp, Artificial
  probe
  misc_feature (1)..(25): SEQ ID NO: 7683; WAN024BBJ; Start 127; Stop 151
gaggttgcagatagagctagagatt

SEQ ID NO: 474740 - DNA, 25 bp, Artificial
  probe
  misc_feature (1)..(25): SEQ ID NO: 7683; WAN024BBJ; Start 233; Stop 257
aggtaaggaaggtcatcggatactg

SEQ ID NO: 474741 - DNA, 25 bp, Artificial
  probe
  misc_feature (1)..(25): SEQ ID NO: 7683; WAN024BBJ; Start 229; Stop 253
ttcaaggtaaggaaggtcatcggat

SEQ ID NO: 474742 - DNA, 25 bp, Artificial
  probe
  misc_feature (1)..(25): SEQ ID NO: 7683; WAN024BBJ; Start 234; Stop 258
ggtaaggaaggtcatcggatactga

SEQ ID NO: 474743 - DNA, 25 bp, Artificial
  probe
  misc_feature (1)..(25): SEQ ID NO: 7683; WAN024BBJ; Start 3; Stop 27
gtcctccattaggcttaatttacct

SEQ ID NO: 474744 - DNA, 25 bp, Artificial
  probe
  misc_feature (1)..(25): SEQ ID NO: 7683; WAN024BBJ; Start 126; Stop 150
tgaggttgcagatagagctagagat

SEQ ID NO: 474745 - DNA, 25 bp, Artificial
  probe
  misc_feature (1)..(25): SEQ ID NO: 7683; WAN024BBJ; Start 2; Stop 26
tgtcctccattaggcttaatttacc

SEQ ID NO: 474746 - DNA, 25 bp, Artificial
  probe
  misc_feature (1)..(25): SEQ ID NO: 7683; WAN024BBJ; Start 4; Stop 28
tcctccattaggcttaatttacctt

SEQ ID NO: 474747 - DNA, 25 bp, Artificial
  probe
  misc_feature (1)..(25): SEQ ID NO: 7683; WAN024BBJ; Start 125; Stop 149
ttgaggttgcagatagagctagaga

SEQ ID NO: 474748 - DNA, 25 bp, Artificial
  probe
  misc_feature (1)..(25): SEQ ID NO: 7683; WAN024BBJ; Start 1; Stop 25
ttgtcctccattaggcttaatttac

SEQ ID NO: 474749 - DNA, 25 bp, Artificial
  probe
  misc_feature (1)..(25): SEQ ID NO: 7683; WAN024BBJ; Start 128; Stop 152
aggttgcagatagagctagagattt

SEQ ID NO: 474750 - DNA, 25 bp, Artificial
  probe
  misc_feature (1)..(25): SEQ ID NO: 7683; WAN024BBJ; Start 5; Stop 29
cctccattaggcttaatttacctta

SEQ ID NO: 474751 - DNA, 25 bp, Artificial
  probe
  misc_feature (1)..(25): SEQ ID NO: 7683; WAN024BBJ; Start 124; Stop 148
tttgaggttgcagatagagctagag

SEQ ID NO: 474752 - DNA, 25 bp, Artificial
  probe
  misc_feature (1)..(25): SEQ ID NO: 7683; WAN024BBJ; Start 225; Stop 249
cattttcaaggtaaggaaggtcatc

SEQ ID NO: 474753 - DNA, 25 bp, Artificial
  probe
  misc_feature (1)..(25): SEQ ID NO: 7683; WAN024BBJ; Start 228; Stop 252
tttcaaggtaaggaaggtcatcgga

SEQ ID NO: 474754 - DNA, 25 bp, Artificial
  probe
  misc_feature (1)..(25): SEQ ID NO: 7683; WAN024BBJ; Start 224; Stop 248
ccattttcaaggtaaggaaggtcat

SEQ ID NO: 474755 - DNA, 25 bp, Artificial
  probe
  misc_feature (1)..(25): SEQ ID NO: 7683; WAN024BBJ; Start 226; Stop 250
attttcaaggtaaggaaggtcatcg

SEQ ID NO: 474756 - DNA, 25 bp, Artificial
  probe
  misc_feature (1)..(25): SEQ ID NO: 7683; WAN024BBJ; Start 178; Stop 202
ggtcttgagataattgtcttttcct

SEQ ID NO: 474757 - DNA, 25 bp, Artificial
  probe
  misc_feature (1)..(25): SEQ ID NO: 7683; WAN024BBJ; Start 177; Stop 201
aggtcttgagataattgtcttttcc

SEQ ID NO: 474758 - DNA, 25 bp, Artificial
  probe
  misc_feature (1)..(25): SEQ ID NO: 7683; WAN024BBJ; Start 189; Stop 213
aattgtcttttcctacttgaccttc

SEQ ID NO: 474759 - DNA, 25 bp, Artificial
  probe
  misc_feature (1)..(25): SEQ ID NO: 7683; WAN024BBJ; Start 190; Stop 214
attgtcttttcctacttgaccttcg

SEQ ID NO: 474760 - DNA, 25 bp, Artificial
  probe
  misc_feature (1)..(25): SEQ ID NO: 7683; WAN024BBJ; Start 173; Stop 197
ttaaaggtcttgagataattgtctt

SEQ ID NO: 474761 - DNA, 25 bp, Artificial
  probe
  misc_feature (1)..(25): SEQ ID NO: 7683; WAN024BBJ; Start 6; Stop 30
ctccattaggcttaatttaccttat

SEQ ID NO: 474762 - DNA, 25 bp, Artificial
  probe
  misc_feature (1)..(25): SEQ ID NO: 7683; WAN024BBJ; Start 129; Stop 153
ggttgcagatagagctagagatttt

SEQ ID NO: 474763 - DNA, 25 bp, Artificial
  probe
  misc_feature (1)..(25): SEQ ID NO: 7683; WAN024BBJ; Start 131; Stop 155
ttgcagatagagctagagattttcg

SEQ ID NO: 474764 - DNA, 25 bp, Artificial
  probe
  misc_feature (1)..(25): SEQ ID NO: 7683; WAN024BBJ; Start 130; Stop 154
gttgcagatagagctagagattttc

SEQ ID NO: 474765 - DNA, 25 bp, Artificial
  probe
  misc_feature (1)..(25): SEQ ID NO: 7683; WAN024BBJ; Start 227; Stop 251
ttttcaaggtaaggaaggtcatcgg

SEQ ID NO: 474766 - DNA, 25 bp, Artificial
  probe
  misc_feature (1)..(25): SEQ ID NO: 7683; WAN024BBJ; Start 188; Stop 212
taattgtcttttcctacttgacctt

SEQ ID NO: 474767 - DNA, 25 bp, Artificial
  probe
  misc_feature (1)..(25): SEQ ID NO: 7683; WAN024BBJ; Start 132; Stop 156
tgcagatagagctagagattttcga

SEQ ID NO: 474768 - DNA, 25 bp, Artificial
  probe
  misc_feature (1)..(25): SEQ ID NO: 7683; WAN024BBJ; Start 176; Stop 200
aaggtcttgagataattgtcttttc

SEQ ID NO: 474769 - DNA, 25 bp, Artificial
  probe
  misc_feature (1)..(25): SEQ ID NO: 7684; WAN024F6J; Start 139; Stop 163
tggacttacataataaccttcctcc

SEQ ID NO: 474770 - DNA, 25 bp, Artificial
  probe
  misc_feature (1)..(25): SEQ ID NO: 7684; WAN024F6J; Start 134; Stop 158
cctactggacttacataataacctt

SEQ ID NO: 474771 - DNA, 25 bp, Artificial
  probe
  misc_feature (1)..(25): SEQ ID NO: 7684; WAN024F6J; Start 137; Stop 161
actggacttacataataaccttcct

SEQ ID NO: 474772 - DNA, 25 bp, Artificial
  probe
  misc_feature (1)..(25): SEQ ID NO: 7684; WAN024F6J; Start 131; Stop 155
agccctactggacttacataataac

SEQ ID NO: 474773 - DNA, 25 bp, Artificial
  probe
  misc_feature (1)..(25): SEQ ID NO: 7684; WAN024F6J; Start 142; Stop 166
acttacataataaccttcctcccag

SEQ ID NO: 474774 - DNA, 25 bp, Artificial
  probe
  misc_feature (1)..(25): SEQ ID NO: 7684; WAN024F6J; Start 141; Stop 165
gacttacataataaccttcctccca

SEQ ID NO: 474775 - DNA, 25 bp, Artificial
  probe
  misc_feature (1)..(25): SEQ ID NO: 7684; WAN024F6J; Start 132; Stop 156
gccctactggacttacataataacc

SEQ ID NO: 474776 - DNA, 25 bp, Artificial
  probe
  misc_feature (1)..(25): SEQ ID NO: 7684; WAN024F6J; Start 143; Stop 167
cttacataataaccttcctcccaga

SEQ ID NO: 474777 - DNA, 25 bp, Artificial
  probe
  misc_feature (1)..(25): SEQ ID NO: 7684; WAN024F6J; Start 138; Stop 162
ctggacttacataataaccttcctc

SEQ ID NO: 474778 - DNA, 25 bp, Artificial
  probe
  misc_feature (1)..(25): SEQ ID NO: 7684; WAN024F6J; Start 133; Stop 157
ccctactggacttacataataacct

SEQ ID NO: 474779 - DNA, 25 bp, Artificial
  probe
  misc_feature (1)..(25): SEQ ID NO: 7684; WAN024F6J; Start 148; Stop 172
ataataaccttcctcccagaaatgc

SEQ ID NO: 474780 - DNA, 25 bp, Artificial
  probe
  misc_feature (1)..(25): SEQ ID NO: 7684; WAN024F6J; Start 146; Stop 170
acataataaccttcctcccagaaat

SEQ ID NO: 474781 - DNA, 25 bp, Artificial
  probe
  misc_feature (1)..(25): SEQ ID NO: 7684; WAN024F6J; Start 147; Stop 171
cataataaccttcctcccagaaatg

SEQ ID NO: 474782 - DNA, 25 bp, Artificial
  probe
  misc_feature (1)..(25): SEQ ID NO: 7684; WAN024F6J; Start 145; Stop 169
tacataataaccttcctcccagaaa

SEQ ID NO: 474783 - DNA, 25 bp, Artificial
  probe
  misc_feature (1)..(25): SEQ ID NO: 7684; WAN024F6J; Start 144; Stop 168
ttacataataaccttcctcccagaa

SEQ ID NO: 474784 - DNA, 25 bp, Artificial
  probe
  misc_feature (1)..(25): SEQ ID NO: 7684; WAN024F6J; Start 130; Stop 154
aagccctactggacttacataataa

SEQ ID NO: 474785 - DNA, 25 bp, Artificial
  probe
  misc_feature (1)..(25): SEQ ID NO: 7684; WAN024F6J; Start 136; Stop 160
tactggacttacataataaccttcc

SEQ ID NO: 474786 - DNA, 25 bp, Artificial
  probe
  misc_feature (1)..(25): SEQ ID NO: 7684; WAN024F6J; Start 175; Stop 199
attcccaaacttgtacttgagattg

SEQ ID NO: 474787 - DNA, 25 bp, Artificial
  probe
  misc_feature (1)..(25): SEQ ID NO: 7684; WAN024F6J; Start 126; Stop 150
cattaagccctactggacttacata

SEQ ID NO: 474788 - DNA, 25 bp, Artificial
  probe
  misc_feature (1)..(25): SEQ ID NO: 7684; WAN024F6J; Start 135; Stop 159
ctactggacttacataataaccttc

SEQ ID NO: 474789 - DNA, 25 bp, Artificial
  probe
  misc_feature (1)..(25): SEQ ID NO: 7684; WAN024F6J; Start 174; Stop 198
gattcccaaacttgtacttgagatt

SEQ ID NO: 474790 - DNA, 25 bp, Artificial
  probe
  misc_feature (1)..(25): SEQ ID NO: 7684; WAN024F6J; Start 123; Stop 147
cttcattaagccctactggacttac

SEQ ID NO: 474791 - DNA, 25 bp, Artificial
  probe
  misc_feature (1)..(25): SEQ ID NO: 7684; WAN024F6J; Start 125; Stop 149
tcattaagccctactggacttacat

SEQ ID NO: 474792 - DNA, 25 bp, Artificial
  probe
  misc_feature (1)..(25): SEQ ID NO: 7684; WAN024F6J; Start 173; Stop 197
cgattcccaaacttgtacttgagat

SEQ ID NO: 474793 - DNA, 25 bp, Artificial
  probe
  misc_feature (1)..(25): SEQ ID NO: 7684; WAN024F6J; Start 182; Stop 206
aacttgtacttgagattggcgtgtt

SEQ ID NO: 474794 - DNA, 25 bp, Artificial
  probe
  misc_feature (1)..(25): SEQ ID NO: 7684; WAN024F6J; Start 128; Stop 152
ttaagccctactggacttacataat

SEQ ID NO: 474795 - DNA, 25 bp, Artificial
  probe
  misc_feature (1)..(25): SEQ ID NO: 7684; WAN024F6J; Start 127; Stop 151
attaagccctactggacttacataa

SEQ ID NO: 474796 - DNA, 25 bp, Artificial
  probe
  misc_feature (1)..(25): SEQ ID NO: 7684; WAN024F6J; Start 124; Stop 148
ttcattaagccctactggacttaca

SEQ ID NO: 474797 - DNA, 25 bp, Artificial
  probe
  misc_feature (1)..(25): SEQ ID NO: 7684; WAN024F6J; Start 140; Stop 164
ggacttacataataaccttcctccc

SEQ ID NO: 474798 - DNA, 25 bp, Artificial
  probe
  misc_feature (1)..(25): SEQ ID NO: 7684; WAN024F6J; Start 149; Stop 173
taataaccttcctcccagaaatgcc

SEQ ID NO: 474799 - DNA, 25 bp, Artificial
  probe
  misc_feature (1)..(25): SEQ ID NO: 7684; WAN024F6J; Start 129; Stop 153
taagccctactggacttacataata

SEQ ID NO: 474800 - DNA, 25 bp, Artificial
  probe
  misc_feature (1)..(25): SEQ ID NO: 7684; WAN024F6J; Start 165; Stop 189
agaaatgccgattcccaaacttgta

SEQ ID NO: 474801 - DNA, 25 bp, Artificial
  probe
  misc_feature (1)..(25): SEQ ID NO: 7684; WAN024F6J; Start 184; Stop 208
cttgtacttgagattggcgtgtttg

SEQ ID NO: 474802 - DNA, 25 bp, Artificial
  probe
  misc_feature (1)..(25): SEQ ID NO: 7685; WAN024BTQ; Start 12; Stop 36
gttagaatatggaaataggttggca

SEQ ID NO: 474803 - DNA, 25 bp, Artificial
  probe
  misc_feature (1)..(25): SEQ ID NO: 7685; WAN024BTQ; Start 11; Stop 35
agttagaatatggaaataggttggc

SEQ ID NO: 474804 - DNA, 25 bp, Artificial
  probe
  misc_feature (1)..(25): SEQ ID NO: 7685; WAN024BTQ; Start 15; Stop 39
agaatatggaaataggttggcaatt

SEQ ID NO: 474805 - DNA, 25 bp, Artificial
  probe
  misc_feature (1)..(25): SEQ ID NO: 7685; WAN024BTQ; Start 58; Stop 82
cctgtttcctattggtacttgacta

SEQ ID NO: 474806 - DNA, 25 bp, Artificial
  probe
  misc_feature (1)..(25): SEQ ID NO: 7685; WAN024BTQ; Start 142; Stop 166
aatgaggtattcaggcttgtgattt

SEQ ID NO: 474807 - DNA, 25 bp, Artificial
  probe
  misc_feature (1)..(25): SEQ ID NO: 7685; WAN024BTQ; Start 141; Stop 165
aaatgaggtattcaggcttgtgatt

SEQ ID NO: 474808 - DNA, 25 bp, Artificial
  probe
  misc_feature (1)..(25): SEQ ID NO: 7685; WAN024BTQ; Start 143; Stop 167
atgaggtattcaggcttgtgatttc

SEQ ID NO: 474809 - DNA, 25 bp, Artificial
  probe
  misc_feature (1)..(25): SEQ ID NO: 7685; WAN024BTQ; Start 13; Stop 37
ttagaatatggaaataggttggcaa

SEQ ID NO: 474810 - DNA, 25 bp, Artificial
  probe
  misc_feature (1)..(25): SEQ ID NO: 7685; WAN024BTQ; Start 14; Stop 38
tagaatatggaaataggttggcaat

SEQ ID NO: 474811 - DNA, 25 bp, Artificial
  probe
  misc_feature (1)..(25): SEQ ID NO: 7685; WAN024BTQ; Start 148; Stop 172
gtattcaggcttgtgatttcctatg

SEQ ID NO: 474812 - DNA, 25 bp, Artificial
  probe
  misc_feature (1)..(25): SEQ ID NO: 7685; WAN024BTQ; Start 149; Stop 173
tattcaggcttgtgatttcctatgg

SEQ ID NO: 474813 - DNA, 25 bp, Artificial
  probe
  misc_feature (1)..(25): SEQ ID NO: 7685; WAN024BTQ; Start 147; Stop 171
ggtattcaggcttgtgatttcctat

SEQ ID NO: 474814 - DNA, 25 bp, Artificial
  probe
  misc_feature (1)..(25): SEQ ID NO: 7685; WAN024BTQ; Start 114; Stop 138
aattgtcttgacacttgttagaatt

SEQ ID NO: 474815 - DNA, 25 bp, Artificial
  probe
  misc_feature (1)..(25): SEQ ID NO: 7685; WAN024BTQ; Start 59; Stop 83
ctgtttcctattggtacttgactat

SEQ ID NO: 474816 - DNA, 25 bp, Artificial
  probe
  misc_feature (1)..(25): SEQ ID NO: 7685; WAN024BTQ; Start 146; Stop 170
aggtattcaggcttgtgatttccta

SEQ ID NO: 474817 - DNA, 25 bp, Artificial
  probe
  misc_feature (1)..(25): SEQ ID NO: 7685; WAN024BTQ; Start 16; Stop 40
gaatatggaaataggttggcaattt

SEQ ID NO: 474818 - DNA, 25 bp, Artificial
  probe
  misc_feature (1)..(25): SEQ ID NO: 7685; WAN024BTQ; Start 10; Stop 34
cagttagaatatggaaataggttgg

SEQ ID NO: 474819 - DNA, 25 bp, Artificial
  probe
  misc_feature (1)..(25): SEQ ID NO: 7685; WAN024BTQ; Start 60; Stop 84
tgtttcctattggtacttgactatt

SEQ ID NO: 474820 - DNA, 25 bp, Artificial
  probe
  misc_feature (1)..(25): SEQ ID NO: 7685; WAN024BTQ; Start 116; Stop 140
ttgtcttgacacttgttagaattaa

SEQ ID NO: 474821 - DNA, 25 bp, Artificial
  probe
  misc_feature (1)..(25): SEQ ID NO: 7685; WAN024BTQ; Start 150; Stop 174
attcaggcttgtgatttcctatgga

SEQ ID NO: 474822 - DNA, 25 bp, Artificial
  probe
  misc_feature (1)..(25): SEQ ID NO: 7685; WAN024BTQ; Start 144; Stop 168
tgaggtattcaggcttgtgatttcc

SEQ ID NO: 474823 - DNA, 25 bp, Artificial
  probe
  misc_feature (1)..(25): SEQ ID NO: 7685; WAN024BTQ; Start 57; Stop 81
acctgtttcctattggtacttgact

SEQ ID NO: 474824 - DNA, 25 bp, Artificial
  probe
  misc_feature (1)..(25): SEQ ID NO: 7685; WAN024BTQ; Start 56; Stop 80
cacctgtttcctattggtacttgac

SEQ ID NO: 474825 - DNA, 25 bp, Artificial
  probe
  misc_feature (1)..(25): SEQ ID NO: 7685; WAN024BTQ; Start 115; Stop 139
attgtcttgacacttgttagaatta

SEQ ID NO: 474826 - DNA, 25 bp, Artificial
  probe
  misc_feature (1)..(25): SEQ ID NO: 7685; WAN024BTQ; Start 1; Stop 25
ttgtcctttcagttagaatatggaa

SEQ ID NO: 474827 - DNA, 25 bp, Artificial
  probe
  misc_feature (1)..(25): SEQ ID NO: 7685; WAN024BTQ; Start 145; Stop 169
gaggtattcaggcttgtgatttcct

SEQ ID NO: 474828 - DNA, 25 bp, Artificial
  probe
  misc_feature (1)..(25): SEQ ID NO: 7685; WAN024BTQ; Start 46; Stop 70
ctcaaaagaccacctgtttcctatt

SEQ ID NO: 474829 - DNA, 25 bp, Artificial
  probe
  misc_feature (1)..(25): SEQ ID NO: 7685; WAN024BTQ; Start 113; Stop 137
caattgtcttgacacttgttagaat

SEQ ID NO: 474830 - DNA, 25 bp, Artificial
  probe
  misc_feature (1)..(25): SEQ ID NO: 7685; WAN024BTQ; Start 55; Stop 79
ccacctgtttcctattggtacttga

SEQ ID NO: 474831 - DNA, 25 bp, Artificial
  probe
  misc_feature (1)..(25): SEQ ID NO: 7685; WAN024BTQ; Start 9; Stop 33
tcagttagaatatggaaataggttg

SEQ ID NO: 474832 - DNA, 25 bp, Artificial
  probe
  misc_feature (1)..(25): SEQ ID NO: 7685; WAN024BTQ; Start 2; Stop 26
tgtcctttcagttagaatatggaaa

SEQ ID NO: 474833 - DNA, 25 bp, Artificial
  probe
  misc_feature (1)..(25): SEQ ID NO: 7685; WAN024BTQ; Start 140; Stop 164
aaaatgaggtattcaggcttgtgat

SEQ ID NO: 474834 - DNA, 25 bp, Artificial
  probe
  misc_feature (1)..(25): SEQ ID NO: 7685; WAN024BTQ; Start 47; Stop 71
tcaaaagaccacctgtttcctattg

SEQ ID NO: 474835 - DNA, 25 bp, Artificial
  probe
  misc_feature (1)..(25): SEQ ID NO: 7686; WAN024BQS; Start 21; Stop 45
gactagctttgctttgggaataaat

SEQ ID NO: 474836 - DNA, 25 bp, Artificial
  probe
  misc_feature (1)..(25): SEQ ID NO: 7686; WAN024BQS; Start 22; Stop 46
actagctttgctttgggaataaatt

SEQ ID NO: 474837 - DNA, 25 bp, Artificial
  probe
  misc_feature (1)..(25): SEQ ID NO: 7686; WAN024BQS; Start 14; Stop 38
attataggactagctttgctttggg

SEQ ID NO: 474838 - DNA, 25 bp, Artificial
  probe
  misc_feature (1)..(25): SEQ ID NO: 7686; WAN024BQS; Start 13; Stop 37
aattataggactagctttgctttgg

SEQ ID NO: 474839 - DNA, 25 bp, Artificial
  probe
  misc_feature (1)..(25): SEQ ID NO: 7686; WAN024BQS; Start 8; Stop 32
acttaaattataggactagctttgc

SEQ ID NO: 474840 - DNA, 25 bp, Artificial
  probe
  misc_feature (1)..(25): SEQ ID NO: 7686; WAN024BQS; Start 18; Stop 42
taggactagctttgctttgggaata

SEQ ID NO: 474841 - DNA, 25 bp, Artificial
  probe
  misc_feature (1)..(25): SEQ ID NO: 7686; WAN024BQS; Start 16; Stop 40
tataggactagctttgctttgggaa

SEQ ID NO: 474842 - DNA, 25 bp, Artificial
  probe
  misc_feature (1)..(25): SEQ ID NO: 7686; WAN024BQS; Start 15; Stop 39
ttataggactagctttgctttggga

SEQ ID NO: 474843 - DNA, 25 bp, Artificial
  probe
  misc_feature (1)..(25): SEQ ID NO: 7686; WAN024BQS; Start 20; Stop 44
ggactagctttgctttgggaataaa

SEQ ID NO: 474844 - DNA, 25 bp, Artificial
  probe
  misc_feature (1)..(25): SEQ ID NO: 7686; WAN024BQS; Start 23; Stop 47
ctagctttgctttgggaataaattt

SEQ ID NO: 474845 - DNA, 25 bp, Artificial
  probe
  misc_feature (1)..(25): SEQ ID NO: 7686; WAN024BQS; Start 17; Stop 41
ataggactagctttgctttgggaat

SEQ ID NO: 474846 - DNA, 25 bp, Artificial
  probe
  misc_feature (1)..(25): SEQ ID NO: 7686; WAN024BQS; Start 19; Stop 43
aggactagctttgctttgggaataa

SEQ ID NO: 474847 - DNA, 25 bp, Artificial
  probe
  misc_feature (1)..(25): SEQ ID NO: 7686; WAN024BQS; Start 12; Stop 36
aaattataggactagctttgctttg

SEQ ID NO: 474848 - DNA, 25 bp, Artificial
  probe
  misc_feature (1)..(25): SEQ ID NO: 7686; WAN024BQS; Start 51; Stop 75
tccgatttggaataaatactctaaa

SEQ ID NO: 474849 - DNA, 25 bp, Artificial
  probe
  misc_feature (1)..(25): SEQ ID NO: 7686; WAN024BQS; Start 50; Stop 74
atccgatttggaataaatactctaa

SEQ ID NO: 474850 - DNA, 25 bp, Artificial
  probe
  misc_feature (1)..(25): SEQ ID NO: 7686; WAN024BQS; Start 49; Stop 73
aatccgatttggaataaatactcta

SEQ ID NO: 474851 - DNA, 25 bp, Artificial
  probe
  misc_feature (1)..(25): SEQ ID NO: 7686; WAN024BQS; Start 48; Stop 72
taatccgatttggaataaatactct

SEQ ID NO: 474852 - DNA, 25 bp, Artificial
  probe
  misc_feature (1)..(25): SEQ ID NO: 7686; WAN024BQS; Start 26; Stop 50
gctttgctttgggaataaattttaa

SEQ ID NO: 474853 - DNA, 25 bp, Artificial
  probe
  misc_feature (1)..(25): SEQ ID NO: 7686; WAN024BQS; Start 30; Stop 54
tgctttgggaataaattttaatccg

SEQ ID NO: 474854 - DNA, 25 bp, Artificial
  probe
  misc_feature (1)..(25): SEQ ID NO: 7686; WAN024BQS; Start 9; Stop 33
cttaaattataggactagctttgct

SEQ ID NO: 474855 - DNA, 25 bp, Artificial
  probe
  misc_feature (1)..(25): SEQ ID NO: 7686; WAN024BQS; Start 31; Stop 55
gctttgggaataaattttaatccga

SEQ ID NO: 474856 - DNA, 25 bp, Artificial
  probe
  misc_feature (1)..(25): SEQ ID NO: 7686; WAN024BQS; Start 11; Stop 35
taaattataggactagctttgcttt

SEQ ID NO: 474857 - DNA, 25 bp, Artificial
  probe
  misc_feature (1)..(25): SEQ ID NO: 7686; WAN024BQS; Start 10; Stop 34
ttaaattataggactagctttgctt

SEQ ID NO: 474858 - DNA, 25 bp, Artificial
  probe
  misc_feature (1)..(25): SEQ ID NO: 7686; WAN024BQS; Start 47; Stop 71
ttaatccgatttggaataaatactc

SEQ ID NO: 474859 - DNA, 25 bp, Artificial
  probe
  misc_feature (1)..(25): SEQ ID NO: 7686; WAN024BQS; Start 25; Stop 49
agctttgctttgggaataaatttta

SEQ ID NO: 474860 - DNA, 25 bp, Artificial
  probe
  misc_feature (1)..(25): SEQ ID NO: 7686; WAN024BQS; Start 24; Stop 48
tagctttgctttgggaataaatttt

SEQ ID NO: 474861 - DNA, 25 bp, Artificial
  probe
  misc_feature (1)..(25): SEQ ID NO: 7686; WAN024BQS; Start 36; Stop 60
gggaataaattttaatccgatttgg

SEQ ID NO: 474862 - DNA, 25 bp, Artificial
  probe
  misc_feature (1)..(25): SEQ ID NO: 7686; WAN024BQS; Start 29; Stop 53
ttgctttgggaataaattttaatcc

SEQ ID NO: 474863 - DNA, 25 bp, Artificial
  probe
  misc_feature (1)..(25): SEQ ID NO: 7686; WAN024BQS; Start 52; Stop 76
ccgatttggaataaatactctaaaa

SEQ ID NO: 474864 - DNA, 25 bp, Artificial
  probe
  misc_feature (1)..(25): SEQ ID NO: 7686; WAN024BQS; Start 35; Stop 59
tgggaataaattttaatccgatttg

SEQ ID NO: 474865 - DNA, 25 bp, Artificial
  probe
  misc_feature (1)..(25): SEQ ID NO: 7686; WAN024BQS; Start 37; Stop 61
ggaataaattttaatccgatttgga

SEQ ID NO: 474866 - DNA, 25 bp, Artificial
  probe
  misc_feature (1)..(25): SEQ ID NO: 7686; WAN024BQS; Start 32; Stop 56
ctttgggaataaattttaatccgat

SEQ ID NO: 474867 - DNA, 25 bp, Artificial
  probe
  misc_feature (1)..(25): SEQ ID NO: 7686; WAN024BQS; Start 28; Stop 52
tttgctttgggaataaattttaatc

SEQ ID NO: 474868 - DNA, 25 bp, Artificial
  probe
  misc_feature (1)..(25): SEQ ID NO: 7687; WAN024F6X; Start 114; Stop 138
tagccttcattacttaacccattca

SEQ ID NO: 474869 - DNA, 25 bp, Artificial
  probe
  misc_feature (1)..(25): SEQ ID NO: 7687; WAN024F6X; Start 97; Stop 121
ccatcacagtttacaattagccttc

SEQ ID NO: 474870 - DNA, 25 bp, Artificial
  probe
  misc_feature (1)..(25): SEQ ID NO: 7687; WAN024F6X; Start 95; Stop 119
atccatcacagtttacaattagcct

SEQ ID NO: 474871 - DNA, 25 bp, Artificial
  probe
  misc_feature (1)..(25): SEQ ID NO: 7687; WAN024F6X; Start 117; Stop 141
ccttcattacttaacccattcacca

SEQ ID NO: 474872 - DNA, 25 bp, Artificial
  probe
  misc_feature (1)..(25): SEQ ID NO: 7687; WAN024F6X; Start 98; Stop 122
catcacagtttacaattagccttca

SEQ ID NO: 474873 - DNA, 25 bp, Artificial
  probe
  misc_feature (1)..(25): SEQ ID NO: 7687; WAN024F6X; Start 96; Stop 120
tccatcacagtttacaattagcctt

SEQ ID NO: 474874 - DNA, 25 bp, Artificial
  probe
  misc_feature (1)..(25): SEQ ID NO: 7687; WAN024F6X; Start 118; Stop 142
cttcattacttaacccattcaccat

SEQ ID NO: 474875 - DNA, 25 bp, Artificial
  probe
  misc_feature (1)..(25): SEQ ID NO: 7687; WAN024F6X; Start 115; Stop 139
agccttcattacttaacccattcac

SEQ ID NO: 474876 - DNA, 25 bp, Artificial
  probe
  misc_feature (1)..(25): SEQ ID NO: 7687; WAN024F6X; Start 110; Stop 134
caattagccttcattacttaaccca

SEQ ID NO: 474877 - DNA, 25 bp, Artificial
  probe
  misc_feature (1)..(25): SEQ ID NO: 7687; WAN024F6X; Start 109; Stop 133
acaattagccttcattacttaaccc

SEQ ID NO: 474878 - DNA, 25 bp, Artificial
  probe
  misc_feature (1)..(25): SEQ ID NO: 7687; WAN024F6X; Start 113; Stop 137
ttagccttcattacttaacccattc

SEQ ID NO: 474879 - DNA, 25 bp, Artificial
  probe
  misc_feature (1)..(25): SEQ ID NO: 7687; WAN024F6X; Start 100; Stop 124
tcacagtttacaattagccttcatt

SEQ ID NO: 474880 - DNA, 25 bp, Artificial
  probe
  misc_feature (1)..(25): SEQ ID NO: 7687; WAN024F6X; Start 94; Stop 118
tatccatcacagtttacaattagcc

SEQ ID NO: 474881 - DNA, 25 bp, Artificial
  probe
  misc_feature (1)..(25): SEQ ID NO: 7687; WAN024F6X; Start 119; Stop 143
ttcattacttaacccattcaccatt

SEQ ID NO: 474882 - DNA, 25 bp, Artificial
  probe
  misc_feature (1)..(25): SEQ ID NO: 7687; WAN024F6X; Start 99; Stop 123
atcacagtttacaattagccttcat

SEQ ID NO: 474883 - DNA, 25 bp, Artificial
  probe
  misc_feature (1)..(25): SEQ ID NO: 7687; WAN024F6X; Start 108; Stop 132
tacaattagccttcattacttaacc

SEQ ID NO: 474884 - DNA, 25 bp, Artificial
  probe
  misc_feature (1)..(25): SEQ ID NO: 7687; WAN024F6X; Start 83; Stop 107
acaaagttaagtatccatcacagtt

SEQ ID NO: 474885 - DNA, 25 bp, Artificial
  probe
  misc_feature (1)..(25): SEQ ID NO: 7687; WAN024F6X; Start 112; Stop 136
attagccttcattacttaacccatt

SEQ ID NO: 474886 - DNA, 25 bp, Artificial
  probe
  misc_feature (1)..(25): SEQ ID NO: 7687; WAN024F6X; Start 116; Stop 140
gccttcattacttaacccattcacc

SEQ ID NO: 474887 - DNA, 25 bp, Artificial
  probe
  misc_feature (1)..(25): SEQ ID NO: 7687; WAN024F6X; Start 111; Stop 135
aattagccttcattacttaacccat

SEQ ID NO: 474888 - DNA, 25 bp, Artificial
  probe
  misc_feature (1)..(25): SEQ ID NO: 7687; WAN024F6X; Start 93; Stop 117
gtatccatcacagtttacaattagc

SEQ ID NO: 474889 - DNA, 25 bp, Artificial
  probe
  misc_feature (1)..(25): SEQ ID NO: 7687; WAN024F6X; Start 120; Stop 144
tcattacttaacccattcaccatta

SEQ ID NO: 474890 - DNA, 25 bp, Artificial
  probe
  misc_feature (1)..(25): SEQ ID NO: 7687; WAN024F6X; Start 87; Stop 111
agttaagtatccatcacagtttaca

SEQ ID NO: 474891 - DNA, 25 bp, Artificial
  probe
  misc_feature (1)..(25): SEQ ID NO: 7687; WAN024F6X; Start 82; Stop 106
tacaaagttaagtatccatcacagt

SEQ ID NO: 474892 - DNA, 25 bp, Artificial
  probe
  misc_feature (1)..(25): SEQ ID NO: 7687; WAN024F6X; Start 102; Stop 126
acagtttacaattagccttcattac

SEQ ID NO: 474893 - DNA, 25 bp, Artificial
  probe
  misc_feature (1)..(25): SEQ ID NO: 7687; WAN024F6X; Start 101; Stop 125
cacagtttacaattagccttcatta

SEQ ID NO: 474894 - DNA, 25 bp, Artificial
  probe
  misc_feature (1)..(25): SEQ ID NO: 7687; WAN024F6X; Start 84; Stop 108
caaagttaagtatccatcacagttt

SEQ ID NO: 474895 - DNA, 25 bp, Artificial
  probe
  misc_feature (1)..(25): SEQ ID NO: 7687; WAN024F6X; Start 88; Stop 112
gttaagtatccatcacagtttacaa

SEQ ID NO: 474896 - DNA, 25 bp, Artificial
  probe
  misc_feature (1)..(25): SEQ ID NO: 7687; WAN024F6X; Start 103; Stop 127
cagtttacaattagccttcattact

SEQ ID NO: 474897 - DNA, 25 bp, Artificial
  probe
  misc_feature (1)..(25): SEQ ID NO: 7687; WAN024F6X; Start 86; Stop 110
aagttaagtatccatcacagtttac

SEQ ID NO: 474898 - DNA, 25 bp, Artificial
  probe
  misc_feature (1)..(25): SEQ ID NO: 7687; WAN024F6X; Start 92; Stop 116
agtatccatcacagtttacaattag

SEQ ID NO: 474899 - DNA, 25 bp, Artificial
  probe
  misc_feature (1)..(25): SEQ ID NO: 7687; WAN024F6X; Start 104; Stop 128
agtttacaattagccttcattactt

SEQ ID NO: 474900 - DNA, 25 bp, Artificial
  probe
  misc_feature (1)..(25): SEQ ID NO: 7687; WAN024F6X; Start 107; Stop 131
ttacaattagccttcattacttaac

SEQ ID NO: 474901 - DNA, 25 bp, Artificial
  probe
  misc_feature (1)..(25): SEQ ID NO: 7688; WAN024CBL; Start 93; Stop 117
agctacgatgcaacaacttattatt

SEQ ID NO: 474902 - DNA, 25 bp, Artificial
  probe
  misc_feature (1)..(25): SEQ ID NO: 7688; WAN024CBL; Start 91; Stop 115
ctagctacgatgcaacaacttatta

SEQ ID NO: 474903 - DNA, 25 bp, Artificial
  probe
  misc_feature (1)..(25): SEQ ID NO: 7688; WAN024CBL; Start 92; Stop 116
tagctacgatgcaacaacttattat

SEQ ID NO: 474904 - DNA, 25 bp, Artificial
  probe
  misc_feature (1)..(25): SEQ ID NO: 7688; WAN024CBL; Start 94; Stop 118
gctacgatgcaacaacttattattt

SEQ ID NO: 474905 - DNA, 25 bp, Artificial
  probe
  misc_feature (1)..(25): SEQ ID NO: 7688; WAN024CBL; Start 1; Stop 25
ttgtctcttcgtaaacctaaaactg

SEQ ID NO: 474906 - DNA, 25 bp, Artificial
  probe
  misc_feature (1)..(25): SEQ ID NO: 7688; WAN024CBL; Start 2; Stop 26
tgtctcttcgtaaacctaaaactgc

SEQ ID NO: 474907 - DNA, 25 bp, Artificial
  probe
  misc_feature (1)..(25): SEQ ID NO: 7688; WAN024CBL; Start 3; Stop 27
gtctcttcgtaaacctaaaactgcg

SEQ ID NO: 474908 - DNA, 25 bp, Artificial
  probe
  misc_feature (1)..(25): SEQ ID NO: 7688; WAN024CBL; Start 10; Stop 34
cgtaaacctaaaactgcggatcttt

SEQ ID NO: 474909 - DNA, 25 bp, Artificial
  probe
  misc_feature (1)..(25): SEQ ID NO: 7688; WAN024CBL; Start 6; Stop 30
tcttcgtaaacctaaaactgcggat

SEQ ID NO: 474910 - DNA, 25 bp, Artificial
  probe
  misc_feature (1)..(25): SEQ ID NO: 7688; WAN024CBL; Start 11; Stop 35
gtaaacctaaaactgcggatctttt

SEQ ID NO: 474911 - DNA, 25 bp, Artificial
  probe
  misc_feature (1)..(25): SEQ ID NO: 7688; WAN024CBL; Start 7; Stop 31
cttcgtaaacctaaaactgcggatc

SEQ ID NO: 474912 - DNA, 25 bp, Artificial
  probe
  misc_feature (1)..(25): SEQ ID NO: 7688; WAN024CBL; Start 9; Stop 33
tcgtaaacctaaaactgcggatctt

SEQ ID NO: 474913 - DNA, 25 bp, Artificial
  probe
  misc_feature (1)..(25): SEQ ID NO: 7688; WAN024CBL; Start 8; Stop 32
ttcgtaaacctaaaactgcggatct

SEQ ID NO: 474914 - DNA, 25 bp, Artificial
  probe
  misc_feature (1)..(25): SEQ ID NO: 7688; WAN024CBL; Start 5; Stop 29
ctcttcgtaaacctaaaactgcgga

SEQ ID NO: 474915 - DNA, 25 bp, Artificial
  probe
  misc_feature (1)..(25): SEQ ID NO: 7688; WAN024CBL; Start 4; Stop 28
tctcttcgtaaacctaaaactgcgg

SEQ ID NO: 474916 - DNA, 25 bp, Artificial
  probe
  misc_feature (1)..(25): SEQ ID NO: 7688; WAN024CBL; Start 15; Stop 39
acctaaaactgcggatcttttattt

SEQ ID NO: 474917 - DNA, 25 bp, Artificial
  probe
  misc_feature (1)..(25): SEQ ID NO: 7688; WAN024CBL; Start 14; Stop 38
aacctaaaactgcggatcttttatt

SEQ ID NO: 474918 - DNA, 25 bp, Artificial
  probe
  misc_feature (1)..(25): SEQ ID NO: 7688; WAN024CBL; Start 13; Stop 37
aaacctaaaactgcggatcttttat

SEQ ID NO: 474919 - DNA, 25 bp, Artificial
  probe
  misc_feature (1)..(25): SEQ ID NO: 7688; WAN024CBL; Start 12; Stop 36
taaacctaaaactgcggatctttta

SEQ ID NO: 474920 - DNA, 25 bp, Artificial
  probe
  misc_feature (1)..(25): SEQ ID NO: 7688; WAN024CBL; Start 16; Stop 40
cctaaaactgcggatcttttatttt

SEQ ID NO: 474921 - DNA, 25 bp, Artificial
  probe
  misc_feature (1)..(25): SEQ ID NO: 7688; WAN024CBL; Start 97; Stop 121
acgatgcaacaacttattattttag

SEQ ID NO: 474922 - DNA, 25 bp, Artificial
  probe
  misc_feature (1)..(25): SEQ ID NO: 7688; WAN024CBL; Start 95; Stop 119
ctacgatgcaacaacttattatttt

SEQ ID NO: 474923 - DNA, 25 bp, Artificial
  probe
  misc_feature (1)..(25): SEQ ID NO: 7688; WAN024CBL; Start 98; Stop 122
cgatgcaacaacttattattttaga

SEQ ID NO: 474924 - DNA, 25 bp, Artificial
  probe
  misc_feature (1)..(25): SEQ ID NO: 7688; WAN024CBL; Start 96; Stop 120
tacgatgcaacaacttattatttta

SEQ ID NO: 474925 - DNA, 25 bp, Artificial
  probe
  misc_feature (1)..(25): SEQ ID NO: 7689; WAN024CNF; Start 86; Stop 110
ctaataccaatacaacaccaactgc

SEQ ID NO: 474926 - DNA, 25 bp, Artificial
  probe
  misc_feature (1)..(25): SEQ ID NO: 7689; WAN024CNF; Start 44; Stop 68
gttgttctgcttgttgttggttata

SEQ ID NO: 474927 - DNA, 25 bp, Artificial
  probe
  misc_feature (1)..(25): SEQ ID NO: 7689; WAN024CNF; Start 46; Stop 70
tgttctgcttgttgttggttatatg

SEQ ID NO: 474928 - DNA, 25 bp, Artificial
  probe
  misc_feature (1)..(25): SEQ ID NO: 7689; WAN024CNF; Start 85; Stop 109
cctaataccaatacaacaccaactg

SEQ ID NO: 474929 - DNA, 25 bp, Artificial
  probe
  misc_feature (1)..(25): SEQ ID NO: 7689; WAN024CNF; Start 47; Stop 71
gttctgcttgttgttggttatatga

SEQ ID NO: 474930 - DNA, 25 bp, Artificial
  probe
  misc_feature (1)..(25): SEQ ID NO: 7689; WAN024CNF; Start 45; Stop 69
ttgttctgcttgttgttggttatat

SEQ ID NO: 474931 - DNA, 25 bp, Artificial
  probe
  misc_feature (1)..(25): SEQ ID NO: 7689; WAN024CNF; Start 49; Stop 73
tctgcttgttgttggttatatgaat

SEQ ID NO: 474932 - DNA, 25 bp, Artificial
  probe
  misc_feature (1)..(25): SEQ ID NO: 7689; WAN024CNF; Start 48; Stop 72
ttctgcttgttgttggttatatgaa

SEQ ID NO: 474933 - DNA, 25 bp, Artificial
  probe
  misc_feature (1)..(25): SEQ ID NO: 7689; WAN024CNF; Start 43; Stop 67
tgttgttctgcttgttgttggttat

SEQ ID NO: 474934 - DNA, 25 bp, Artificial
  probe
  misc_feature (1)..(25): SEQ ID NO: 7689; WAN024CNF; Start 42; Stop 66
ttgttgttctgcttgttgttggtta

SEQ ID NO: 474935 - DNA, 25 bp, Artificial
  probe
  misc_feature (1)..(25): SEQ ID NO: 7689; WAN024CNF; Start 51; Stop 75
tgcttgttgttggttatatgaatac

SEQ ID NO: 474936 - DNA, 25 bp, Artificial
  probe
  misc_feature (1)..(25): SEQ ID NO: 7689; WAN024CNF; Start 50; Stop 74
ctgcttgttgttggttatatgaata

SEQ ID NO: 474937 - DNA, 25 bp, Artificial
  probe
  misc_feature (1)..(25): SEQ ID NO: 7689; WAN024CNF; Start 82; Stop 106
aaccctaataccaatacaacaccaa

SEQ ID NO: 474938 - DNA, 25 bp, Artificial
  probe
  misc_feature (1)..(25): SEQ ID NO: 7689; WAN024CNF; Start 81; Stop 105
aaaccctaataccaatacaacacca

SEQ ID NO: 474939 - DNA, 25 bp, Artificial
  probe
  misc_feature (1)..(25): SEQ ID NO: 7689; WAN024CNF; Start 80; Stop 104
caaaccctaataccaatacaacacc

SEQ ID NO: 474940 - DNA, 25 bp, Artificial
  probe
  misc_feature (1)..(25): SEQ ID NO: 7689; WAN024CNF; Start 79; Stop 103
ccaaaccctaataccaatacaacac

SEQ ID NO: 474941 - DNA, 25 bp, Artificial
  probe
  misc_feature (1)..(25): SEQ ID NO: 7689; WAN024CNF; Start 78; Stop 102
tccaaaccctaataccaatacaaca

SEQ ID NO: 474942 - DNA, 25 bp, Artificial
  probe
  misc_feature (1)..(25): SEQ ID NO: 7689; WAN024CNF; Start 70; Stop 94
gaataccatccaaaccctaatacca

SEQ ID NO: 474943 - DNA, 25 bp, Artificial
  probe
  misc_feature (1)..(25): SEQ ID NO: 7689; WAN024CNF; Start 69; Stop 93
tgaataccatccaaaccctaatacc

SEQ ID NO: 474944 - DNA, 25 bp, Artificial
  probe
  misc_feature (1)..(25): SEQ ID NO: 7689; WAN024CNF; Start 75; Stop 99
ccatccaaaccctaataccaataca

SEQ ID NO: 474945 - DNA, 25 bp, Artificial
  probe
  misc_feature (1)..(25): SEQ ID NO: 7689; WAN024CNF; Start 74; Stop 98
accatccaaaccctaataccaatac

SEQ ID NO: 474946 - DNA, 25 bp, Artificial
  probe
  misc_feature (1)..(25): SEQ ID NO: 7689; WAN024CNF; Start 71; Stop 95
aataccatccaaaccctaataccaa

SEQ ID NO: 474947 - DNA, 25 bp, Artificial
  probe
  misc_feature (1)..(25): SEQ ID NO: 7689; WAN024CNF; Start 87; Stop 111
taataccaatacaacaccaactgca

SEQ ID NO: 474948 - DNA, 25 bp, Artificial
  probe
  misc_feature (1)..(25): SEQ ID NO: 7689; WAN024CNF; Start 84; Stop 108
ccctaataccaatacaacaccaact

SEQ ID NO: 474949 - DNA, 25 bp, Artificial
  probe
  misc_feature (1)..(25): SEQ ID NO: 7689; WAN024CNF; Start 72; Stop 96
ataccatccaaaccctaataccaat

SEQ ID NO: 474950 - DNA, 25 bp, Artificial
  probe
  misc_feature (1)..(25): SEQ ID NO: 7689; WAN024CNF; Start 83; Stop 107
accctaataccaatacaacaccaac

SEQ ID NO: 474951 - DNA, 25 bp, Artificial
  probe
  misc_feature (1)..(25): SEQ ID NO: 7689; WAN024CNF; Start 279; Stop 303
gttcggctcggttgatttaatttaa

SEQ ID NO: 474952 - DNA, 25 bp, Artificial
  probe
  misc_feature (1)..(25): SEQ ID NO: 7689; WAN024CNF; Start 73; Stop 97
taccatccaaaccctaataccaata

SEQ ID NO: 474953 - DNA, 25 bp, Artificial
  probe
  misc_feature (1)..(25): SEQ ID NO: 7689; WAN024CNF; Start 41; Stop 65
cttgttgttctgcttgttgttggtt

SEQ ID NO: 474954 - DNA, 25 bp, Artificial
  probe
  misc_feature (1)..(25): SEQ ID NO: 7689; WAN024CNF; Start 52; Stop 76
gcttgttgttggttatatgaatacc

SEQ ID NO: 474955 - DNA, 25 bp, Artificial
  probe
  misc_feature (1)..(25): SEQ ID NO: 7689; WAN024CNF; Start 77; Stop 101
atccaaaccctaataccaatacaac

SEQ ID NO: 474956 - DNA, 25 bp, Artificial
  probe
  misc_feature (1)..(25): SEQ ID NO: 7689; WAN024CNF; Start 76; Stop 100
catccaaaccctaataccaatacaa

SEQ ID NO: 474957 - DNA, 25 bp, Artificial
  probe
  misc_feature (1)..(25): SEQ ID NO: 7689; WAN024CNF; Start 275; Stop 299
ttatgttcggctcggttgatttaat

SEQ ID NO: 474958 - DNA, 25 bp, Artificial
  probe
  misc_feature (1)..(25): SEQ ID NO: 7690; WAN024CQ3; Start 69; Stop 93
aactccaagtaacacagatccaatt

SEQ ID NO: 474959 - DNA, 25 bp, Artificial
  probe
  misc_feature (1)..(25): SEQ ID NO: 7690; WAN024CQ3; Start 65; Stop 89
ctagaactccaagtaacacagatcc

SEQ ID NO: 474960 - DNA, 25 bp, Artificial
  probe
  misc_feature (1)..(25): SEQ ID NO: 7690; WAN024CQ3; Start 68; Stop 92
gaactccaagtaacacagatccaat

SEQ ID NO: 474961 - DNA, 25 bp, Artificial
  probe
  misc_feature (1)..(25): SEQ ID NO: 7690; WAN024CQ3; Start 66; Stop 90
tagaactccaagtaacacagatcca

SEQ ID NO: 474962 - DNA, 25 bp, Artificial
  probe
  misc_feature (1)..(25): SEQ ID NO: 7690; WAN024CQ3; Start 64; Stop 88
gctagaactccaagtaacacagatc

SEQ ID NO: 474963 - DNA, 25 bp, Artificial
  probe
  misc_feature (1)..(25): SEQ ID NO: 7690; WAN024CQ3; Start 63; Stop 87
tgctagaactccaagtaacacagat

SEQ ID NO: 474964 - DNA, 25 bp, Artificial
  probe
  misc_feature (1)..(25): SEQ ID NO: 7690; WAN024CQ3; Start 91; Stop 115
attgacgactcagtacctgtattag

SEQ ID NO: 474965 - DNA, 25 bp, Artificial
  probe
  misc_feature (1)..(25): SEQ ID NO: 7690; WAN024CQ3; Start 90; Stop 114
aattgacgactcagtacctgtatta

SEQ ID NO: 474966 - DNA, 25 bp, Artificial
  probe
  misc_feature (1)..(25): SEQ ID NO: 7690; WAN024CQ3; Start 99; Stop 123
ctcagtacctgtattaggcaattct

SEQ ID NO: 474967 - DNA, 25 bp, Artificial
  probe
  misc_feature (1)..(25): SEQ ID NO: 7690; WAN024CQ3; Start 98; Stop 122
actcagtacctgtattaggcaattc

SEQ ID NO: 474968 - DNA, 25 bp, Artificial
  probe
  misc_feature (1)..(25): SEQ ID NO: 7690; WAN024CQ3; Start 97; Stop 121
gactcagtacctgtattaggcaatt

SEQ ID NO: 474969 - DNA, 25 bp, Artificial
  probe
  misc_feature (1)..(25): SEQ ID NO: 7690; WAN024CQ3; Start 100; Stop 124
tcagtacctgtattaggcaattctt

SEQ ID NO: 474970 - DNA, 25 bp, Artificial
  probe
  misc_feature (1)..(25): SEQ ID NO: 7690; WAN024CQ3; Start 67; Stop 91
agaactccaagtaacacagatccaa

SEQ ID NO: 474971 - DNA, 25 bp, Artificial
  probe
  misc_feature (1)..(25): SEQ ID NO: 7690; WAN024CQ3; Start 34; Stop 58
ttcgcaaccaatccaatacctgtaa

SEQ ID NO: 474972 - DNA, 25 bp, Artificial
  probe
  misc_feature (1)..(25): SEQ ID NO: 7690; WAN024CQ3; Start 1; Stop 25
ttgtcttactcttcttcatcacgtt

SEQ ID NO: 474973 - DNA, 25 bp, Artificial
  probe
  misc_feature (1)..(25): SEQ ID NO: 7690; WAN024CQ3; Start 92; Stop 116
ttgacgactcagtacctgtattagg

SEQ ID NO: 474974 - DNA, 25 bp, Artificial
  probe
  misc_feature (1)..(25): SEQ ID NO: 7690; WAN024CQ3; Start 62; Stop 86
ctgctagaactccaagtaacacaga

SEQ ID NO: 474975 - DNA, 25 bp, Artificial
  probe
  misc_feature (1)..(25): SEQ ID NO: 7690; WAN024CQ3; Start 96; Stop 120
cgactcagtacctgtattaggcaat

SEQ ID NO: 474976 - DNA, 25 bp, Artificial
  probe
  misc_feature (1)..(25): SEQ ID NO: 7690; WAN024CQ3; Start 186; Stop 210
atttgaaactgatgtacttgctgaa

SEQ ID NO: 474977 - DNA, 25 bp, Artificial
  probe
  misc_feature (1)..(25): SEQ ID NO: 7690; WAN024CQ3; Start 185; Stop 209
aatttgaaactgatgtacttgctga

SEQ ID NO: 474978 - DNA, 25 bp, Artificial
  probe
  misc_feature (1)..(25): SEQ ID NO: 7690; WAN024CQ3; Start 183; Stop 207
tgaatttgaaactgatgtacttgct

SEQ ID NO: 474979 - DNA, 25 bp, Artificial
  probe
  misc_feature (1)..(25): SEQ ID NO: 7690; WAN024CQ3; Start 180; Stop 204
tgctgaatttgaaactgatgtactt

SEQ ID NO: 474980 - DNA, 25 bp, Artificial
  probe
  misc_feature (1)..(25): SEQ ID NO: 7690; WAN024CQ3; Start 179; Stop 203
ttgctgaatttgaaactgatgtact

SEQ ID NO: 474981 - DNA, 25 bp, Artificial
  probe
  misc_feature (1)..(25): SEQ ID NO: 7690; WAN024CQ3; Start 184; Stop 208
gaatttgaaactgatgtacttgctg

SEQ ID NO: 474982 - DNA, 25 bp, Artificial
  probe
  misc_feature (1)..(25): SEQ ID NO: 7690; WAN024CQ3; Start 182; Stop 206
ctgaatttgaaactgatgtacttgc

SEQ ID NO: 474983 - DNA, 25 bp, Artificial
  probe
  misc_feature (1)..(25): SEQ ID NO: 7690; WAN024CQ3; Start 181; Stop 205
gctgaatttgaaactgatgtacttg

SEQ ID NO: 474984 - DNA, 25 bp, Artificial
  probe
  misc_feature (1)..(25): SEQ ID NO: 7690; WAN024CQ3; Start 35; Stop 59
tcgcaaccaatccaatacctgtaac

SEQ ID NO: 474985 - DNA, 25 bp, Artificial
  probe
  misc_feature (1)..(25): SEQ ID NO: 7690; WAN024CQ3; Start 187; Stop 211
tttgaaactgatgtacttgctgaag

SEQ ID NO: 474986 - DNA, 25 bp, Artificial
  probe
  misc_feature (1)..(25): SEQ ID NO: 7690; WAN024CQ3; Start 178; Stop 202
tttgctgaatttgaaactgatgtac

SEQ ID NO: 474987 - DNA, 25 bp, Artificial
  probe
  misc_feature (1)..(25): SEQ ID NO: 7690; WAN024CQ3; Start 38; Stop 62
caaccaatccaatacctgtaacagc

SEQ ID NO: 474988 - DNA, 25 bp, Artificial
  probe
  misc_feature (1)..(25): SEQ ID NO: 7690; WAN024CQ3; Start 37; Stop 61
gcaaccaatccaatacctgtaacag

SEQ ID NO: 474989 - DNA, 25 bp, Artificial
  probe
  misc_feature (1)..(25): SEQ ID NO: 7690; WAN024CQ3; Start 36; Stop 60
cgcaaccaatccaatacctgtaaca

SEQ ID NO: 474990 - DNA, 25 bp, Artificial
  probe
  misc_feature (1)..(25): SEQ ID NO: 7690; WAN024CQ3; Start 39; Stop 63
aaccaatccaatacctgtaacagct

SEQ ID NO: 474991 - DNA, 25 bp, Artificial
  probe
  misc_feature (1)..(25): SEQ ID NO: 7691; WAN024F3D; Start 25; Stop 49
gcctctagcatttctttactcatgt

SEQ ID NO: 474992 - DNA, 25 bp, Artificial
  probe
  misc_feature (1)..(25): SEQ ID NO: 7691; WAN024F3D; Start 26; Stop 50
cctctagcatttctttactcatgtt

SEQ ID NO: 474993 - DNA, 25 bp, Artificial
  probe
  misc_feature (1)..(25): SEQ ID NO: 7691; WAN024F3D; Start 27; Stop 51
ctctagcatttctttactcatgttt

SEQ ID NO: 474994 - DNA, 25 bp, Artificial
  probe
  misc_feature (1)..(25): SEQ ID NO: 7691; WAN024F3D; Start 24; Stop 48
ggcctctagcatttctttactcatg

SEQ ID NO: 474995 - DNA, 25 bp, Artificial
  probe
  misc_feature (1)..(25): SEQ ID NO: 7691; WAN024F3D; Start 31; Stop 55
agcatttctttactcatgttttctt

SEQ ID NO: 474996 - DNA, 25 bp, Artificial
  probe
  misc_feature (1)..(25): SEQ ID NO: 7691; WAN024F3D; Start 32; Stop 56
gcatttctttactcatgttttcttc

SEQ ID NO: 474997 - DNA, 25 bp, Artificial
  probe
  misc_feature (1)..(25): SEQ ID NO: 7691; WAN024F3D; Start 37; Stop 61
tctttactcatgttttcttcacttt

SEQ ID NO: 474998 - DNA, 25 bp, Artificial
  probe
  misc_feature (1)..(25): SEQ ID NO: 7691; WAN024F3D; Start 36; Stop 60
ttctttactcatgttttcttcactt

SEQ ID NO: 474999 - DNA, 25 bp, Artificial
  probe
  misc_feature (1)..(25): SEQ ID NO: 7691; WAN024F3D; Start 35; Stop 59
tttctttactcatgttttcttcact

SEQ ID NO: 475000 - DNA, 25 bp, Artificial
  probe
  misc_feature (1)..(25): SEQ ID NO: 7691; WAN024F3D; Start 40; Stop 64
ttactcatgttttcttcacttttga

SEQ ID NO: 475001 - DNA, 25 bp, Artificial
  probe
  misc_feature (1)..(25): SEQ ID NO: 7691; WAN024F3D; Start 62; Stop 86
tgaatcctcaaaagctatcctttct

SEQ ID NO: 475002 - DNA, 25 bp, Artificial
  probe
  misc_feature (1)..(25): SEQ ID NO: 7691; WAN024F3D; Start 47; Stop 71
tgttttcttcacttttgaatcctca

SEQ ID NO: 475003 - DNA, 25 bp, Artificial
  probe
  misc_feature (1)..(25): SEQ ID NO: 7691; WAN024F3D; Start 30; Stop 54
tagcatttctttactcatgttttct

SEQ ID NO: 475004 - DNA, 25 bp, Artificial
  probe
  misc_feature (1)..(25): SEQ ID NO: 7691; WAN024F3D; Start 28; Stop 52
tctagcatttctttactcatgtttt

SEQ ID NO: 475005 - DNA, 25 bp, Artificial
  probe
  misc_feature (1)..(25): SEQ ID NO: 7691; WAN024F3D; Start 63; Stop 87
gaatcctcaaaagctatcctttctt

SEQ ID NO: 475006 - DNA, 25 bp, Artificial
  probe
  misc_feature (1)..(25): SEQ ID NO: 7691; WAN024F3D; Start 39; Stop 63
tttactcatgttttcttcacttttg

SEQ ID NO: 475007 - DNA, 25 bp, Artificial
  probe
  misc_feature (1)..(25): SEQ ID NO: 7691; WAN024F3D; Start 29; Stop 53
ctagcatttctttactcatgttttc

SEQ ID NO: 475008 - DNA, 25 bp, Artificial
  probe
  misc_feature (1)..(25): SEQ ID NO: 7691; WAN024F3D; Start 64; Stop 88
aatcctcaaaagctatcctttcttt

SEQ ID NO: 475009 - DNA, 25 bp, Artificial
  probe
  misc_feature (1)..(25): SEQ ID NO: 7691; WAN024F3D; Start 48; Stop 72
gttttcttcacttttgaatcctcaa

SEQ ID NO: 475010 - DNA, 25 bp, Artificial
  probe
  misc_feature (1)..(25): SEQ ID NO: 7691; WAN024F3D; Start 45; Stop 69
catgttttcttcacttttgaatcct

SEQ ID NO: 475011 - DNA, 25 bp, Artificial
  probe
  misc_feature (1)..(25): SEQ ID NO: 7691; WAN024F3D; Start 44; Stop 68
tcatgttttcttcacttttgaatcc

SEQ ID NO: 475012 - DNA, 25 bp, Artificial
  probe
  misc_feature (1)..(25): SEQ ID NO: 7691; WAN024F3D; Start 38; Stop 62
ctttactcatgttttcttcactttt

SEQ ID NO: 475013 - DNA, 25 bp, Artificial
  probe
  misc_feature (1)..(25): SEQ ID NO: 7691; WAN024F3D; Start 46; Stop 70
atgttttcttcacttttgaatcctc

SEQ ID NO: 475014 - DNA, 25 bp, Artificial
  probe
  misc_feature (1)..(25): SEQ ID NO: 7691; WAN024F3D; Start 61; Stop 85
ttgaatcctcaaaagctatcctttc

SEQ ID NO: 475015 - DNA, 25 bp, Artificial
  probe
  misc_feature (1)..(25): SEQ ID NO: 7691; WAN024F3D; Start 34; Stop 58
atttctttactcatgttttcttcac

SEQ ID NO: 475016 - DNA, 25 bp, Artificial
  probe
  misc_feature (1)..(25): SEQ ID NO: 7691; WAN024F3D; Start 33; Stop 57
catttctttactcatgttttcttca

SEQ ID NO: 475017 - DNA, 25 bp, Artificial
  probe
  misc_feature (1)..(25): SEQ ID NO: 7691; WAN024F3D; Start 42; Stop 66
actcatgttttcttcacttttgaat

SEQ ID NO: 475018 - DNA, 25 bp, Artificial
  probe
  misc_feature (1)..(25): SEQ ID NO: 7691; WAN024F3D; Start 43; Stop 67
ctcatgttttcttcacttttgaatc

SEQ ID NO: 475019 - DNA, 25 bp, Artificial
  probe
  misc_feature (1)..(25): SEQ ID NO: 7691; WAN024F3D; Start 41; Stop 65
tactcatgttttcttcacttttgaa

SEQ ID NO: 475020 - DNA, 25 bp, Artificial
  probe
  misc_feature (1)..(25): SEQ ID NO: 7691; WAN024F3D; Start 65; Stop 89
atcctcaaaagctatcctttctttt

SEQ ID NO: 475021 - DNA, 25 bp, Artificial
  probe
  misc_feature (1)..(25): SEQ ID NO: 7691; WAN024F3D; Start 60; Stop 84
tttgaatcctcaaaagctatccttt

SEQ ID NO: 475022 - DNA, 25 bp, Artificial
  probe
  misc_feature (1)..(25): SEQ ID NO: 7691; WAN024F3D; Start 49; Stop 73
ttttcttcacttttgaatcctcaaa

SEQ ID NO: 475023 - DNA, 25 bp, Artificial
  probe
  misc_feature (1)..(25): SEQ ID NO: 7692; WAN024BM8; Start 31; Stop 55
aacgctttatatttctatggcaaga

SEQ ID NO: 475024 - DNA, 25 bp, Artificial
  probe
  misc_feature (1)..(25): SEQ ID NO: 7692; WAN024BM8; Start 32; Stop 56
acgctttatatttctatggcaagat

SEQ ID NO: 475025 - DNA, 25 bp, Artificial
  probe
  misc_feature (1)..(25): SEQ ID NO: 7692; WAN024BM8; Start 33; Stop 57
cgctttatatttctatggcaagatg

SEQ ID NO: 475026 - DNA, 25 bp, Artificial
  probe
  misc_feature (1)..(25): SEQ ID NO: 7692; WAN024BM8; Start 30; Stop 54
aaacgctttatatttctatggcaag

SEQ ID NO: 475027 - DNA, 25 bp, Artificial
  probe
  misc_feature (1)..(25): SEQ ID NO: 7692; WAN024BM8; Start 34; Stop 58
gctttatatttctatggcaagatga

SEQ ID NO: 475028 - DNA, 25 bp, Artificial
  probe
  misc_feature (1)..(25): SEQ ID NO: 7692; WAN024BM8; Start 39; Stop 63
atatttctatggcaagatgaccaaa

SEQ ID NO: 475029 - DNA, 25 bp, Artificial
  probe
  misc_feature (1)..(25): SEQ ID NO: 7692; WAN024BM8; Start 36; Stop 60
tttatatttctatggcaagatgacc

SEQ ID NO: 475030 - DNA, 25 bp, Artificial
  probe
  misc_feature (1)..(25): SEQ ID NO: 7692; WAN024BM8; Start 38; Stop 62
tatatttctatggcaagatgaccaa

SEQ ID NO: 475031 - DNA, 25 bp, Artificial
  probe
  misc_feature (1)..(25): SEQ ID NO: 7692; WAN024BM8; Start 37; Stop 61
ttatatttctatggcaagatgacca

SEQ ID NO: 475032 - DNA, 25 bp, Artificial
  probe
  misc_feature (1)..(25): SEQ ID NO: 7692; WAN024BM8; Start 29; Stop 53
aaaacgctttatatttctatggcaa

SEQ ID NO: 475033 - DNA, 25 bp, Artificial
  probe
  misc_feature (1)..(25): SEQ ID NO: 7692; WAN024BM8; Start 35; Stop 59
ctttatatttctatggcaagatgac

SEQ ID NO: 475034 - DNA, 25 bp, Artificial
  probe
  misc_feature (1)..(25): SEQ ID NO: 7692; WAN024BM8; Start 40; Stop 64
tatttctatggcaagatgaccaaaa

SEQ ID NO: 475035 - DNA, 25 bp, Artificial
  probe
  misc_feature (1)..(25): SEQ ID NO: 7692; WAN024BM8; Start 28; Stop 52
gaaaacgctttatatttctatggca

SEQ ID NO: 475036 - DNA, 25 bp, Artificial
  probe
  misc_feature (1)..(25): SEQ ID NO: 7692; WAN024BM8; Start 27; Stop 51
tgaaaacgctttatatttctatggc

SEQ ID NO: 475037 - DNA, 25 bp, Artificial
  probe
  misc_feature (1)..(25): SEQ ID NO: 7692; WAN024BM8; Start 26; Stop 50
atgaaaacgctttatatttctatgg

SEQ ID NO: 475038 - DNA, 25 bp, Artificial
  probe
  misc_feature (1)..(25): SEQ ID NO: 7692; WAN024BM8; Start 25; Stop 49
gatgaaaacgctttatatttctatg

SEQ ID NO: 475039 - DNA, 25 bp, Artificial
  probe
  misc_feature (1)..(25): SEQ ID NO: 7693; WAN024GD9; Start 115; Stop 139
tggactaatataaactaccttgcgg

SEQ ID NO: 475040 - DNA, 25 bp, Artificial
  probe
  misc_feature (1)..(25): SEQ ID NO: 7693; WAN024GD9; Start 116; Stop 140
ggactaatataaactaccttgcggg

SEQ ID NO: 475041 - DNA, 25 bp, Artificial
  probe
  misc_feature (1)..(25): SEQ ID NO: 7693; WAN024GD9; Start 114; Stop 138
ctggactaatataaactaccttgcg

SEQ ID NO: 475042 - DNA, 25 bp, Artificial
  probe
  misc_feature (1)..(25): SEQ ID NO: 7693; WAN024GD9; Start 68; Stop 92
aattcttgctctctcatcaaatctg

SEQ ID NO: 475043 - DNA, 25 bp, Artificial
  probe
  misc_feature (1)..(25): SEQ ID NO: 7693; WAN024GD9; Start 67; Stop 91
caattcttgctctctcatcaaatct

SEQ ID NO: 475044 - DNA, 25 bp, Artificial
  probe
  misc_feature (1)..(25): SEQ ID NO: 7693; WAN024GD9; Start 69; Stop 93
attcttgctctctcatcaaatctgc

SEQ ID NO: 475045 - DNA, 25 bp, Artificial
  probe
  misc_feature (1)..(25): SEQ ID NO: 7693; WAN024GD9; Start 147; Stop 171
aatctttaactgccatgagacttct

SEQ ID NO: 475046 - DNA, 25 bp, Artificial
  probe
  misc_feature (1)..(25): SEQ ID NO: 7693; WAN024GD9; Start 146; Stop 170
aaatctttaactgccatgagacttc

SEQ ID NO: 475047 - DNA, 25 bp, Artificial
  probe
  misc_feature (1)..(25): SEQ ID NO: 7693; WAN024GD9; Start 113; Stop 137
tctggactaatataaactaccttgc

SEQ ID NO: 475048 - DNA, 25 bp, Artificial
  probe
  misc_feature (1)..(25): SEQ ID NO: 7693; WAN024GD9; Start 148; Stop 172
atctttaactgccatgagacttctc

SEQ ID NO: 475049 - DNA, 25 bp, Artificial
  probe
  misc_feature (1)..(25): SEQ ID NO: 7693; WAN024GD9; Start 70; Stop 94
ttcttgctctctcatcaaatctgct

SEQ ID NO: 475050 - DNA, 25 bp, Artificial
  probe
  misc_feature (1)..(25): SEQ ID NO: 7693; WAN024GD9; Start 212; Stop 236
atctatcaaacgcttacatttcttt

SEQ ID NO: 475051 - DNA, 25 bp, Artificial
  probe
  misc_feature (1)..(25): SEQ ID NO: 7693; WAN024GD9; Start 211; Stop 235
aatctatcaaacgcttacatttctt

SEQ ID NO: 475052 - DNA, 25 bp, Artificial
  probe
  misc_feature (1)..(25): SEQ ID NO: 7693; WAN024GD9; Start 123; Stop 147
tataaactaccttgcgggtcataaa

SEQ ID NO: 475053 - DNA, 25 bp, Artificial
  probe
  misc_feature (1)..(25): SEQ ID NO: 7693; WAN024GD9; Start 119; Stop 143
ctaatataaactaccttgcgggtca

SEQ ID NO: 475054 - DNA, 25 bp, Artificial
  probe
  misc_feature (1)..(25): SEQ ID NO: 7693; WAN024GD9; Start 118; Stop 142
actaatataaactaccttgcgggtc

SEQ ID NO: 475055 - DNA, 25 bp, Artificial
  probe
  misc_feature (1)..(25): SEQ ID NO: 7693; WAN024GD9; Start 117; Stop 141
gactaatataaactaccttgcgggt

SEQ ID NO: 475056 - DNA, 25 bp, Artificial
  probe
  misc_feature (1)..(25): SEQ ID NO: 7693; WAN024GD9; Start 122; Stop 146
atataaactaccttgcgggtcataa

SEQ ID NO: 475057 - DNA, 25 bp, Artificial
  probe
  misc_feature (1)..(25): SEQ ID NO: 7693; WAN024GD9; Start 121; Stop 145
aatataaactaccttgcgggtcata

SEQ ID NO: 475058 - DNA, 25 bp, Artificial
  probe
  misc_feature (1)..(25): SEQ ID NO: 7693; WAN024GD9; Start 120; Stop 144
taatataaactaccttgcgggtcat

SEQ ID NO: 475059 - DNA, 25 bp, Artificial
  probe
  misc_feature (1)..(25): SEQ ID NO: 7693; WAN024GD9; Start 89; Stop 113
tctgctgcatgagatactgttgtat

SEQ ID NO: 475060 - DNA, 25 bp, Artificial
  probe
  misc_feature (1)..(25): SEQ ID NO: 7693; WAN024GD9; Start 152; Stop 176
ttaactgccatgagacttctccttt

SEQ ID NO: 475061 - DNA, 25 bp, Artificial
  probe
  misc_feature (1)..(25): SEQ ID NO: 7693; WAN024GD9; Start 151; Stop 175
tttaactgccatgagacttctcctt

SEQ ID NO: 475062 - DNA, 25 bp, Artificial
  probe
  misc_feature (1)..(25): SEQ ID NO: 7693; WAN024GD9; Start 71; Stop 95
tcttgctctctcatcaaatctgctg

SEQ ID NO: 475063 - DNA, 25 bp, Artificial
  probe
  misc_feature (1)..(25): SEQ ID NO: 7693; WAN024GD9; Start 88; Stop 112
atctgctgcatgagatactgttgta

SEQ ID NO: 475064 - DNA, 25 bp, Artificial
  probe
  misc_feature (1)..(25): SEQ ID NO: 7693; WAN024GD9; Start 210; Stop 234
aaatctatcaaacgcttacatttct

SEQ ID NO: 475065 - DNA, 25 bp, Artificial
  probe
  misc_feature (1)..(25): SEQ ID NO: 7693; WAN024GD9; Start 150; Stop 174
ctttaactgccatgagacttctcct

SEQ ID NO: 475066 - DNA, 25 bp, Artificial
  probe
  misc_feature (1)..(25): SEQ ID NO: 7693; WAN024GD9; Start 149; Stop 173
tctttaactgccatgagacttctcc

SEQ ID NO: 475067 - DNA, 25 bp, Artificial
  probe
  misc_feature (1)..(25): SEQ ID NO: 7693; WAN024GD9; Start 168; Stop 192
ttctccttttctattcttatcccca

SEQ ID NO: 475068 - DNA, 25 bp, Artificial
  probe
  misc_feature (1)..(25): SEQ ID NO: 7693; WAN024GD9; Start 134; Stop 158
ttgcgggtcataaaatctttaactg

SEQ ID NO: 475069 - DNA, 25 bp, Artificial
  probe
  misc_feature (1)..(25): SEQ ID NO: 7693; WAN024GD9; Start 133; Stop 157
cttgcgggtcataaaatctttaact

SEQ ID NO: 475070 - DNA, 25 bp, Artificial
  probe
  misc_feature (1)..(25): SEQ ID NO: 7693; WAN024GD9; Start 138; Stop 162
gggtcataaaatctttaactgccat

SEQ ID NO: 475071 - DNA, 25 bp, Artificial
  probe
  misc_feature (1)..(25): SEQ ID NO: 7693; WAN024GD9; Start 169; Stop 193
tctccttttctattcttatccccat

SEQ ID NO: 475072 - DNA, 25 bp, Artificial
  probe
  misc_feature (1)..(25): SEQ ID NO: 7694; WAN024BWM; Start 544; Stop 568
gaagtgagaagagacaggatatacg

SEQ ID NO: 475073 - DNA, 25 bp, Artificial
  probe
  misc_feature (1)..(25): SEQ ID NO: 7694; WAN024BWM; Start 543; Stop 567
cgaagtgagaagagacaggatatac

SEQ ID NO: 475074 - DNA, 25 bp, Artificial
  probe
  misc_feature (1)..(25): SEQ ID NO: 7694; WAN024BWM; Start 542; Stop 566
acgaagtgagaagagacaggatata

SEQ ID NO: 475075 - DNA, 25 bp, Artificial
  probe
  misc_feature (1)..(25): SEQ ID NO: 7694; WAN024BWM; Start 541; Stop 565
aacgaagtgagaagagacaggatat

SEQ ID NO: 475076 - DNA, 25 bp, Artificial
  probe
  misc_feature (1)..(25): SEQ ID NO: 7694; WAN024BWM; Start 540; Stop 564
gaacgaagtgagaagagacaggata

SEQ ID NO: 475077 - DNA, 25 bp, Artificial
  probe
  misc_feature (1)..(25): SEQ ID NO: 7694; WAN024BWM; Start 103; Stop 127
ccaacctgttactactgtaatctgt

SEQ ID NO: 475078 - DNA, 25 bp, Artificial
  probe
  misc_feature (1)..(25): SEQ ID NO: 7694; WAN024BWM; Start 102; Stop 126
tccaacctgttactactgtaatctg

SEQ ID NO: 475079 - DNA, 25 bp, Artificial
  probe
  misc_feature (1)..(25): SEQ ID NO: 7694; WAN024BWM; Start 101; Stop 125
gtccaacctgttactactgtaatct

SEQ ID NO: 475080 - DNA, 25 bp, Artificial
  probe
  misc_feature (1)..(25): SEQ ID NO: 7694; WAN024BWM; Start 100; Stop 124
agtccaacctgttactactgtaatc

SEQ ID NO: 475081 - DNA, 25 bp, Artificial
  probe
  misc_feature (1)..(25): SEQ ID NO: 7694; WAN024BWM; Start 99; Stop 123
gagtccaacctgttactactgtaat

SEQ ID NO: 475082 - DNA, 25 bp, Artificial
  probe
  misc_feature (1)..(25): SEQ ID NO: 7694; WAN024BWM; Start 106; Stop 130
acctgttactactgtaatctgttca

SEQ ID NO: 475083 - DNA, 25 bp, Artificial
  probe
  misc_feature (1)..(25): SEQ ID NO: 7694; WAN024BWM; Start 545; Stop 569
aagtgagaagagacaggatatacgt

SEQ ID NO: 475084 - DNA, 25 bp, Artificial
  probe
  misc_feature (1)..(25): SEQ ID NO: 7694; WAN024BWM; Start 104; Stop 128
caacctgttactactgtaatctgtt

SEQ ID NO: 475085 - DNA, 25 bp, Artificial
  probe
  misc_feature (1)..(25): SEQ ID NO: 7694; WAN024BWM; Start 165; Stop 189
aattctgattccaaacttcgtcttc

SEQ ID NO: 475086 - DNA, 25 bp, Artificial
  probe
  misc_feature (1)..(25): SEQ ID NO: 7694; WAN024BWM; Start 107; Stop 131
cctgttactactgtaatctgttcaa

SEQ ID NO: 475087 - DNA, 25 bp, Artificial
  probe
  misc_feature (1)..(25): SEQ ID NO: 7694; WAN024BWM; Start 105; Stop 129
aacctgttactactgtaatctgttc

SEQ ID NO: 475088 - DNA, 25 bp, Artificial
  probe
  misc_feature (1)..(25): SEQ ID NO: 7694; WAN024BWM; Start 98; Stop 122
cgagtccaacctgttactactgtaa

SEQ ID NO: 475089 - DNA, 25 bp, Artificial
  probe
  misc_feature (1)..(25): SEQ ID NO: 7694; WAN024BWM; Start 164; Stop 188
aaattctgattccaaacttcgtctt

SEQ ID NO: 475090 - DNA, 25 bp, Artificial
  probe
  misc_feature (1)..(25): SEQ ID NO: 7694; WAN024BWM; Start 355; Stop 379
gtggacaaagacaacttcataaaga

SEQ ID NO: 475091 - DNA, 25 bp, Artificial
  probe
  misc_feature (1)..(25): SEQ ID NO: 7694; WAN024BWM; Start 548; Stop 572
tgagaagagacaggatatacgtgac

SEQ ID NO: 475092 - DNA, 25 bp, Artificial
  probe
  misc_feature (1)..(25): SEQ ID NO: 7694; WAN024BWM; Start 547; Stop 571
gtgagaagagacaggatatacgtga

SEQ ID NO: 475093 - DNA, 25 bp, Artificial
  probe
  misc_feature (1)..(25): SEQ ID NO: 7694; WAN024BWM; Start 546; Stop 570
agtgagaagagacaggatatacgtg

SEQ ID NO: 475094 - DNA, 25 bp, Artificial
  probe
  misc_feature (1)..(25): SEQ ID NO: 7694; WAN024BWM; Start 163; Stop 187
gaaattctgattccaaacttcgtct

SEQ ID NO: 475095 - DNA, 25 bp, Artificial
  probe
  misc_feature (1)..(25): SEQ ID NO: 7694; WAN024BWM; Start 166; Stop 190
attctgattccaaacttcgtcttcg

SEQ ID NO: 475096 - DNA, 25 bp, Artificial
  probe
  misc_feature (1)..(25): SEQ ID NO: 7694; WAN024BWM; Start 356; Stop 380
tggacaaagacaacttcataaagat

SEQ ID NO: 475097 - DNA, 25 bp, Artificial
  probe
  misc_feature (1)..(25): SEQ ID NO: 7694; WAN024BWM; Start 134; Stop 158
aagaagtattcccgaaagaagattt

SEQ ID NO: 475098 - DNA, 25 bp, Artificial
  probe
  misc_feature (1)..(25): SEQ ID NO: 7694; WAN024BWM; Start 133; Stop 157
aaagaagtattcccgaaagaagatt

SEQ ID NO: 475099 - DNA, 25 bp, Artificial
  probe
  misc_feature (1)..(25): SEQ ID NO: 7694; WAN024BWM; Start 354; Stop 378
tgtggacaaagacaacttcataaag

SEQ ID NO: 475100 - DNA, 25 bp, Artificial
  probe
  misc_feature (1)..(25): SEQ ID NO: 7694; WAN024BWM; Start 549; Stop 573
gagaagagacaggatatacgtgacg

SEQ ID NO: 475101 - DNA, 25 bp, Artificial
  probe
  misc_feature (1)..(25): SEQ ID NO: 7694; WAN024BWM; Start 353; Stop 377
atgtggacaaagacaacttcataaa

SEQ ID NO: 475102 - DNA, 25 bp, Artificial
  probe
  misc_feature (1)..(25): SEQ ID NO: 7694; WAN024BWM; Start 402; Stop 426
gttgaaagaagacttccagacctac

SEQ ID NO: 475103 - DNA, 25 bp, Artificial
  probe
  misc_feature (1)..(25): SEQ ID NO: 7694; WAN024BWM; Start 407; Stop 431
aagaagacttccagacctacctgaa

SEQ ID NO: 475104 - DNA, 25 bp, Artificial
  probe
  misc_feature (1)..(25): SEQ ID NO: 7694; WAN024BWM; Start 554; Stop 578
gagacaggatatacgtgacggattc

SEQ ID NO: 475105 - DNA, 25 bp, Artificial
  probe
  misc_feature (1)..(25): SEQ ID NO: 7695; WAN024BXX; Start 70; Stop 94
gctcgtttatctcctttcactctta

SEQ ID NO: 475106 - DNA, 25 bp, Artificial
  probe
  misc_feature (1)..(25): SEQ ID NO: 7695; WAN024BXX; Start 71; Stop 95
ctcgtttatctcctttcactcttag

SEQ ID NO: 475107 - DNA, 25 bp, Artificial
  probe
  misc_feature (1)..(25): SEQ ID NO: 7695; WAN024BXX; Start 77; Stop 101
tatctcctttcactcttagtcccaa

SEQ ID NO: 475108 - DNA, 25 bp, Artificial
  probe
  misc_feature (1)..(25): SEQ ID NO: 7695; WAN024BXX; Start 76; Stop 100
ttatctcctttcactcttagtccca

SEQ ID NO: 475109 - DNA, 25 bp, Artificial
  probe
  misc_feature (1)..(25): SEQ ID NO: 7695; WAN024BXX; Start 75; Stop 99
tttatctcctttcactcttagtccc

SEQ ID NO: 475110 - DNA, 25 bp, Artificial
  probe
  misc_feature (1)..(25): SEQ ID NO: 7695; WAN024BXX; Start 72; Stop 96
tcgtttatctcctttcactcttagt

SEQ ID NO: 475111 - DNA, 25 bp, Artificial
  probe
  misc_feature (1)..(25): SEQ ID NO: 7695; WAN024BXX; Start 67; Stop 91
cttgctcgtttatctcctttcactc

SEQ ID NO: 475112 - DNA, 25 bp, Artificial
  probe
  misc_feature (1)..(25): SEQ ID NO: 7695; WAN024BXX; Start 78; Stop 102
atctcctttcactcttagtcccaat

SEQ ID NO: 475113 - DNA, 25 bp, Artificial
  probe
  misc_feature (1)..(25): SEQ ID NO: 7695; WAN024BXX; Start 73; Stop 97
cgtttatctcctttcactcttagtc

SEQ ID NO: 475114 - DNA, 25 bp, Artificial
  probe
  misc_feature (1)..(25): SEQ ID NO: 7695; WAN024BXX; Start 69; Stop 93
tgctcgtttatctcctttcactctt

SEQ ID NO: 475115 - DNA, 25 bp, Artificial
  probe
  misc_feature (1)..(25): SEQ ID NO: 7695; WAN024BXX; Start 68; Stop 92
ttgctcgtttatctcctttcactct

SEQ ID NO: 475116 - DNA, 25 bp, Artificial
  probe
  misc_feature (1)..(25): SEQ ID NO: 7695; WAN024BXX; Start 74; Stop 98
gtttatctcctttcactcttagtcc

SEQ ID NO: 475117 - DNA, 25 bp, Artificial
  probe
  misc_feature (1)..(25): SEQ ID NO: 7695; WAN024BXX; Start 79; Stop 103
tctcctttcactcttagtcccaatg

SEQ ID NO: 475118 - DNA, 25 bp, Artificial
  probe
  misc_feature (1)..(25): SEQ ID NO: 7695; WAN024BXX; Start 80; Stop 104
ctcctttcactcttagtcccaatgt

SEQ ID NO: 475119 - DNA, 25 bp, Artificial
  probe
  misc_feature (1)..(25): SEQ ID NO: 7695; WAN024BXX; Start 66; Stop 90
ccttgctcgtttatctcctttcact

SEQ ID NO: 475120 - DNA, 25 bp, Artificial
  probe
  misc_feature (1)..(25): SEQ ID NO: 7695; WAN024BXX; Start 81; Stop 105
tcctttcactcttagtcccaatgtg

SEQ ID NO: 475121 - DNA, 25 bp, Artificial
  probe
  misc_feature (1)..(25): SEQ ID NO: 7695; WAN024BXX; Start 13; Stop 37
aagaagatggtttcatgtttctcac

SEQ ID NO: 475122 - DNA, 25 bp, Artificial
  probe
  misc_feature (1)..(25): SEQ ID NO: 7695; WAN024BXX; Start 12; Stop 36
aaagaagatggtttcatgtttctca

SEQ ID NO: 475123 - DNA, 25 bp, Artificial
  probe
  misc_feature (1)..(25): SEQ ID NO: 7695; WAN024BXX; Start 15; Stop 39
gaagatggtttcatgtttctcaccc

SEQ ID NO: 475124 - DNA, 25 bp, Artificial
  probe
  misc_feature (1)..(25): SEQ ID NO: 7695; WAN024BXX; Start 14; Stop 38
agaagatggtttcatgtttctcacc

SEQ ID NO: 475125 - DNA, 25 bp, Artificial
  probe
  misc_feature (1)..(25): SEQ ID NO: 7695; WAN024BXX; Start 1; Stop 25
ttgtggtctgaaaagaagatggttt

SEQ ID NO: 475126 - DNA, 25 bp, Artificial
  probe
  misc_feature (1)..(25): SEQ ID NO: 7695; WAN024BXX; Start 42; Stop 66
tttctgtctaggaaaggaagtgagc

SEQ ID NO: 475127 - DNA, 25 bp, Artificial
  probe
  misc_feature (1)..(25): SEQ ID NO: 7695; WAN024BXX; Start 111; Stop 135
gggatttgttgcattactgataaat

SEQ ID NO: 475128 - DNA, 25 bp, Artificial
  probe
  misc_feature (1)..(25): SEQ ID NO: 7695; WAN024BXX; Start 43; Stop 67
ttctgtctaggaaaggaagtgagcc

SEQ ID NO: 475129 - DNA, 25 bp, Artificial
  probe
  misc_feature (1)..(25): SEQ ID NO: 7695; WAN024BXX; Start 65; Stop 89
gccttgctcgtttatctcctttcac

SEQ ID NO: 475130 - DNA, 25 bp, Artificial
  probe
  misc_feature (1)..(25): SEQ ID NO: 7695; WAN024BXX; Start 110; Stop 134
ggggatttgttgcattactgataaa

SEQ ID NO: 475131 - DNA, 25 bp, Artificial
  probe
  misc_feature (1)..(25): SEQ ID NO: 7695; WAN024BXX; Start 87; Stop 111
cactcttagtcccaatgtgaaaggg

SEQ ID NO: 475132 - DNA, 25 bp, Artificial
  probe
  misc_feature (1)..(25): SEQ ID NO: 7695; WAN024BXX; Start 2; Stop 26
tgtggtctgaaaagaagatggtttc

SEQ ID NO: 475133 - DNA, 25 bp, Artificial
  probe
  misc_feature (1)..(25): SEQ ID NO: 7695; WAN024BXX; Start 44; Stop 68
tctgtctaggaaaggaagtgagcct

SEQ ID NO: 475134 - DNA, 25 bp, Artificial
  probe
  misc_feature (1)..(25): SEQ ID NO: 7695; WAN024BXX; Start 11; Stop 35
aaaagaagatggtttcatgtttctc

SEQ ID NO: 475135 - DNA, 25 bp, Artificial
  probe
  misc_feature (1)..(25): SEQ ID NO: 7695; WAN024BXX; Start 10; Stop 34
gaaaagaagatggtttcatgtttct

SEQ ID NO: 475136 - DNA, 25 bp, Artificial
  probe
  misc_feature (1)..(25): SEQ ID NO: 7695; WAN024BXX; Start 112; Stop 136
ggatttgttgcattactgataaata

SEQ ID NO: 475137 - DNA, 25 bp, Artificial
  probe
  misc_feature (1)..(25): SEQ ID NO: 7695; WAN024BXX; Start 86; Stop 110
tcactcttagtcccaatgtgaaagg

SEQ ID NO: 475138 - DNA, 25 bp, Artificial
  probe
  misc_feature (1)..(25): SEQ ID NO: 7696; WAN024EZL; Start 8; Stop 32
tgaacaacaagtataacacagaggt

SEQ ID NO: 475139 - DNA, 25 bp, Artificial
  probe
  misc_feature (1)..(25): SEQ ID NO: 7696; WAN024EZL; Start 54; Stop 78
ctatcggctagttgaaccatctaat

SEQ ID NO: 475140 - DNA, 25 bp, Artificial
  probe
  misc_feature (1)..(25): SEQ ID NO: 7696; WAN024EZL; Start 55; Stop 79
tatcggctagttgaaccatctaatt

SEQ ID NO: 475141 - DNA, 25 bp, Artificial
  probe
  misc_feature (1)..(25): SEQ ID NO: 7696; WAN024EZL; Start 7; Stop 31
ttgaacaacaagtataacacagagg

SEQ ID NO: 475142 - DNA, 25 bp, Artificial
  probe
  misc_feature (1)..(25): SEQ ID NO: 7696; WAN024EZL; Start 9; Stop 33
gaacaacaagtataacacagaggtg

SEQ ID NO: 475143 - DNA, 25 bp, Artificial
  probe
  misc_feature (1)..(25): SEQ ID NO: 7696; WAN024EZL; Start 4; Stop 28
tggttgaacaacaagtataacacag

SEQ ID NO: 475144 - DNA, 25 bp, Artificial
  probe
  misc_feature (1)..(25): SEQ ID NO: 7696; WAN024EZL; Start 5; Stop 29
ggttgaacaacaagtataacacaga

SEQ ID NO: 475145 - DNA, 25 bp, Artificial
  probe
  misc_feature (1)..(25): SEQ ID NO: 7696; WAN024EZL; Start 53; Stop 77
gctatcggctagttgaaccatctaa

SEQ ID NO: 475146 - DNA, 25 bp, Artificial
  probe
  misc_feature (1)..(25): SEQ ID NO: 7696; WAN024EZL; Start 6; Stop 30
gttgaacaacaagtataacacagag

SEQ ID NO: 475147 - DNA, 25 bp, Artificial
  probe
  misc_feature (1)..(25): SEQ ID NO: 7696; WAN024EZL; Start 3; Stop 27
gtggttgaacaacaagtataacaca

SEQ ID NO: 475148 - DNA, 25 bp, Artificial
  probe
  misc_feature (1)..(25): SEQ ID NO: 7696; WAN024EZL; Start 2; Stop 26
tgtggttgaacaacaagtataacac

SEQ ID NO: 475149 - DNA, 25 bp, Artificial
  probe
  misc_feature (1)..(25): SEQ ID NO: 7696; WAN024EZL; Start 56; Stop 80
atcggctagttgaaccatctaattt

SEQ ID NO: 475150 - DNA, 25 bp, Artificial
  probe
  misc_feature (1)..(25): SEQ ID NO: 7696; WAN024EZL; Start 1; Stop 25
ttgtggttgaacaacaagtataaca

SEQ ID NO: 475151 - DNA, 25 bp, Artificial
  probe
  misc_feature (1)..(25): SEQ ID NO: 7696; WAN024EZL; Start 45; Stop 69
ctacaagagctatcggctagttgaa

SEQ ID NO: 475152 - DNA, 25 bp, Artificial
  probe
  misc_feature (1)..(25): SEQ ID NO: 7696; WAN024EZL; Start 36; Stop 60
ttcttatgcctacaagagctatcgg

SEQ ID NO: 475153 - DNA, 25 bp, Artificial
  probe
  misc_feature (1)..(25): SEQ ID NO: 7696; WAN024EZL; Start 46; Stop 70
tacaagagctatcggctagttgaac

SEQ ID NO: 475154 - DNA, 25 bp, Artificial
  probe
  misc_feature (1)..(25): SEQ ID NO: 7696; WAN024EZL; Start 57; Stop 81
tcggctagttgaaccatctaatttt

SEQ ID NO: 475155 - DNA, 25 bp, Artificial
  probe
  misc_feature (1)..(25): SEQ ID NO: 7696; WAN024EZL; Start 35; Stop 59
tttcttatgcctacaagagctatcg

SEQ ID NO: 475156 - DNA, 25 bp, Artificial
  probe
  misc_feature (1)..(25): SEQ ID NO: 7696; WAN024EZL; Start 52; Stop 76
agctatcggctagttgaaccatcta

SEQ ID NO: 475157 - DNA, 25 bp, Artificial
  probe
  misc_feature (1)..(25): SEQ ID NO: 7696; WAN024EZL; Start 10; Stop 34
aacaacaagtataacacagaggtgt

SEQ ID NO: 475158 - DNA, 25 bp, Artificial
  probe
  misc_feature (1)..(25): SEQ ID NO: 7696; WAN024EZL; Start 26; Stop 50
cagaggtgttttcttatgcctacaa

SEQ ID NO: 475159 - DNA, 25 bp, Artificial
  probe
  misc_feature (1)..(25): SEQ ID NO: 7696; WAN024EZL; Start 44; Stop 68
cctacaagagctatcggctagttga

SEQ ID NO: 475160 - DNA, 25 bp, Artificial
  probe
  misc_feature (1)..(25): SEQ ID NO: 7696; WAN024EZL; Start 49; Stop 73
aagagctatcggctagttgaaccat

SEQ ID NO: 475161 - DNA, 25 bp, Artificial
  probe
  misc_feature (1)..(25): SEQ ID NO: 7696; WAN024EZL; Start 24; Stop 48
cacagaggtgttttcttatgcctac

SEQ ID NO: 475162 - DNA, 25 bp, Artificial
  probe
  misc_feature (1)..(25): SEQ ID NO: 7696; WAN024EZL; Start 25; Stop 49
acagaggtgttttcttatgcctaca

SEQ ID NO: 475163 - DNA, 25 bp, Artificial
  probe
  misc_feature (1)..(25): SEQ ID NO: 7696; WAN024EZL; Start 51; Stop 75
gagctatcggctagttgaaccatct

SEQ ID NO: 475164 - DNA, 25 bp, Artificial
  probe
  misc_feature (1)..(25): SEQ ID NO: 7696; WAN024EZL; Start 50; Stop 74
agagctatcggctagttgaaccatc

SEQ ID NO: 475165 - DNA, 25 bp, Artificial
  probe
  misc_feature (1)..(25): SEQ ID NO: 7696; WAN024EZL; Start 39; Stop 63
ttatgcctacaagagctatcggcta

SEQ ID NO: 475166 - DNA, 25 bp, Artificial
  probe
  misc_feature (1)..(25): SEQ ID NO: 7696; WAN024EZL; Start 48; Stop 72
caagagctatcggctagttgaacca

SEQ ID NO: 475167 - DNA, 25 bp, Artificial
  probe
  misc_feature (1)..(25): SEQ ID NO: 7696; WAN024EZL; Start 47; Stop 71
acaagagctatcggctagttgaacc

SEQ ID NO: 475168 - DNA, 25 bp, Artificial
  probe
  misc_feature (1)..(25): SEQ ID NO: 7696; WAN024EZL; Start 40; Stop 64
tatgcctacaagagctatcggctag

SEQ ID NO: 475169 - DNA, 25 bp, Artificial
  probe
  misc_feature (1)..(25): SEQ ID NO: 7696; WAN024EZL; Start 38; Stop 62
cttatgcctacaagagctatcggct

SEQ ID NO: 475170 - DNA, 25 bp, Artificial
  probe
  misc_feature (1)..(25): SEQ ID NO: 7696; WAN024EZL; Start 37; Stop 61
tcttatgcctacaagagctatcggc

SEQ ID NO: 475171 - DNA, 25 bp, Artificial
  probe
  misc_feature (1)..(25): SEQ ID NO: 7697; WAN024DMD; Start 49; Stop 73
atcaacccagaaatcaacgaagcat

SEQ ID NO: 475172 - DNA, 25 bp, Artificial
  probe
  misc_feature (1)..(25): SEQ ID NO: 7697; WAN024DMD; Start 50; Stop 74
tcaacccagaaatcaacgaagcatt

SEQ ID NO: 475173 - DNA, 25 bp, Artificial
  probe
  misc_feature (1)..(25): SEQ ID NO: 7697; WAN024DMD; Start 51; Stop 75
caacccagaaatcaacgaagcattg

SEQ ID NO: 475174 - DNA, 25 bp, Artificial
  probe
  misc_feature (1)..(25): SEQ ID NO: 7697; WAN024DMD; Start 52; Stop 76
aacccagaaatcaacgaagcattgt

SEQ ID NO: 475175 - DNA, 25 bp, Artificial
  probe
  misc_feature (1)..(25): SEQ ID NO: 7697; WAN024DMD; Start 53; Stop 77
acccagaaatcaacgaagcattgtc

SEQ ID NO: 475176 - DNA, 25 bp, Artificial
  probe
  misc_feature (1)..(25): SEQ ID NO: 7697; WAN024DMD; Start 54; Stop 78
cccagaaatcaacgaagcattgtcg

SEQ ID NO: 475177 - DNA, 25 bp, Artificial
  probe
  misc_feature (1)..(25): SEQ ID NO: 7698; WAN024BQ6; Start 55; Stop 79
gcttgcttaatctcttctccagtat

SEQ ID NO: 475178 - DNA, 25 bp, Artificial
  probe
  misc_feature (1)..(25): SEQ ID NO: 7698; WAN024BQ6; Start 50; Stop 74
atatcgcttgcttaatctcttctcc

SEQ ID NO: 475179 - DNA, 25 bp, Artificial
  probe
  misc_feature (1)..(25): SEQ ID NO: 7698; WAN024BQ6; Start 56; Stop 80
cttgcttaatctcttctccagtatt

SEQ ID NO: 475180 - DNA, 25 bp, Artificial
  probe
  misc_feature (1)..(25): SEQ ID NO: 7698; WAN024BQ6; Start 51; Stop 75
tatcgcttgcttaatctcttctcca

SEQ ID NO: 475181 - DNA, 25 bp, Artificial
  probe
  misc_feature (1)..(25): SEQ ID NO: 7698; WAN024BQ6; Start 54; Stop 78
cgcttgcttaatctcttctccagta

SEQ ID NO: 475182 - DNA, 25 bp, Artificial
  probe
  misc_feature (1)..(25): SEQ ID NO: 7698; WAN024BQ6; Start 52; Stop 76
atcgcttgcttaatctcttctccag

SEQ ID NO: 475183 - DNA, 25 bp, Artificial
  probe
  misc_feature (1)..(25): SEQ ID NO: 7698; WAN024BQ6; Start 9; Stop 33
gatgaatagagatgcacgtatcgaa

SEQ ID NO: 475184 - DNA, 25 bp, Artificial
  probe
  misc_feature (1)..(25): SEQ ID NO: 7698; WAN024BQ6; Start 41; Stop 65
atagtggtgatatcgcttgcttaat

SEQ ID NO: 475185 - DNA, 25 bp, Artificial
  probe
  misc_feature (1)..(25): SEQ ID NO: 7698; WAN024BQ6; Start 7; Stop 31
ttgatgaatagagatgcacgtatcg

SEQ ID NO: 475186 - DNA, 25 bp, Artificial
  probe
  misc_feature (1)..(25): SEQ ID NO: 7698; WAN024BQ6; Start 48; Stop 72
tgatatcgcttgcttaatctcttct

SEQ ID NO: 475187 - DNA, 25 bp, Artificial
  probe
  misc_feature (1)..(25): SEQ ID NO: 7698; WAN024BQ6; Start 47; Stop 71
gtgatatcgcttgcttaatctcttc

SEQ ID NO: 475188 - DNA, 25 bp, Artificial
  probe
  misc_feature (1)..(25): SEQ ID NO: 7698; WAN024BQ6; Start 49; Stop 73
gatatcgcttgcttaatctcttctc

SEQ ID NO: 475189 - DNA, 25 bp, Artificial
  probe
  misc_feature (1)..(25): SEQ ID NO: 7698; WAN024BQ6; Start 42; Stop 66
tagtggtgatatcgcttgcttaatc

SEQ ID NO: 475190 - DNA, 25 bp, Artificial
  probe
  misc_feature (1)..(25): SEQ ID NO: 7698; WAN024BQ6; Start 46; Stop 70
ggtgatatcgcttgcttaatctctt

SEQ ID NO: 475191 - DNA, 25 bp, Artificial
  probe
  misc_feature (1)..(25): SEQ ID NO: 7698; WAN024BQ6; Start 8; Stop 32
tgatgaatagagatgcacgtatcga

SEQ ID NO: 475192 - DNA, 25 bp, Artificial
  probe
  misc_feature (1)..(25): SEQ ID NO: 7698; WAN024BQ6; Start 59; Stop 83
gcttaatctcttctccagtatttgt

SEQ ID NO: 475193 - DNA, 25 bp, Artificial
  probe
  misc_feature (1)..(25): SEQ ID NO: 7698; WAN024BQ6; Start 58; Stop 82
tgcttaatctcttctccagtatttg

SEQ ID NO: 475194 - DNA, 25 bp, Artificial
  probe
  misc_feature (1)..(25): SEQ ID NO: 7698; WAN024BQ6; Start 34; Stop 58
attcaagatagtggtgatatcgctt

SEQ ID NO: 475195 - DNA, 25 bp, Artificial
  probe
  misc_feature (1)..(25): SEQ ID NO: 7698; WAN024BQ6; Start 33; Stop 57
aattcaagatagtggtgatatcgct

SEQ ID NO: 475196 - DNA, 25 bp, Artificial
  probe
  misc_feature (1)..(25): SEQ ID NO: 7698; WAN024BQ6; Start 40; Stop 64
gatagtggtgatatcgcttgcttaa

SEQ ID NO: 475197 - DNA, 25 bp, Artificial
  probe
  misc_feature (1)..(25): SEQ ID NO: 7698; WAN024BQ6; Start 45; Stop 69
tggtgatatcgcttgcttaatctct

SEQ ID NO: 475198 - DNA, 25 bp, Artificial
  probe
  misc_feature (1)..(25): SEQ ID NO: 7698; WAN024BQ6; Start 44; Stop 68
gtggtgatatcgcttgcttaatctc

SEQ ID NO: 475199 - DNA, 25 bp, Artificial
  probe
  misc_feature (1)..(25): SEQ ID NO: 7698; WAN024BQ6; Start 57; Stop 81
ttgcttaatctcttctccagtattt

SEQ ID NO: 475200 - DNA, 25 bp, Artificial
  probe
  misc_feature (1)..(25): SEQ ID NO: 7698; WAN024BQ6; Start 43; Stop 67
agtggtgatatcgcttgcttaatct

SEQ ID NO: 475201 - DNA, 25 bp, Artificial
  probe
  misc_feature (1)..(25): SEQ ID NO: 7698; WAN024BQ6; Start 39; Stop 63
agatagtggtgatatcgcttgctta

SEQ ID NO: 475202 - DNA, 25 bp, Artificial
  probe
  misc_feature (1)..(25): SEQ ID NO: 7698; WAN024BQ6; Start 65; Stop 89
tctcttctccagtatttgtagtaga

SEQ ID NO: 475203 - DNA, 25 bp, Artificial
  probe
  misc_feature (1)..(25): SEQ ID NO: 7698; WAN024BQ6; Start 53; Stop 77
tcgcttgcttaatctcttctccagt

SEQ ID NO: 475204 - DNA, 25 bp, Artificial
  probe
  misc_feature (1)..(25): SEQ ID NO: 7698; WAN024BQ6; Start 4; Stop 28
tgtttgatgaatagagatgcacgta

SEQ ID NO: 475205 - DNA, 25 bp, Artificial
  probe
  misc_feature (1)..(25): SEQ ID NO: 7698; WAN024BQ6; Start 38; Stop 62
aagatagtggtgatatcgcttgctt

SEQ ID NO: 475206 - DNA, 25 bp, Artificial
  probe
  misc_feature (1)..(25): SEQ ID NO: 7698; WAN024BQ6; Start 14; Stop 38
atagagatgcacgtatcgaaattca

SEQ ID NO: 475207 - DNA, 25 bp, Artificial
  probe
  misc_feature (1)..(25): SEQ ID NO: 7698; WAN024BQ6; Start 11; Stop 35
tgaatagagatgcacgtatcgaaat

SEQ ID NO: 475208 - DNA, 25 bp, Artificial
  probe
  misc_feature (1)..(25): SEQ ID NO: 7698; WAN024BQ6; Start 10; Stop 34
atgaatagagatgcacgtatcgaaa

SEQ ID NO: 475209 - DNA, 25 bp, Artificial
  probe
  misc_feature (1)..(25): SEQ ID NO: 7698; WAN024BQ6; Start 15; Stop 39
tagagatgcacgtatcgaaattcaa

SEQ ID NO: 475210 - DNA, 25 bp, Artificial
  probe
  misc_feature (1)..(25): SEQ ID NO: 7699; WAN024C2J; Start 42; Stop 66
agaaagtcgaaataaatttgtgaaa

SEQ ID NO: 475211 - DNA, 25 bp, Artificial
  probe
  misc_feature (1)..(25): SEQ ID NO: 7699; WAN024C2J; Start 41; Stop 65
aagaaagtcgaaataaatttgtgaa

SEQ ID NO: 475212 - DNA, 25 bp, Artificial
  probe
  misc_feature (1)..(25): SEQ ID NO: 7699; WAN024C2J; Start 40; Stop 64
aaagaaagtcgaaataaatttgtga

SEQ ID NO: 475213 - DNA, 25 bp, Artificial
  probe
  misc_feature (1)..(25): SEQ ID NO: 7699; WAN024C2J; Start 43; Stop 67
gaaagtcgaaataaatttgtgaaaa

SEQ ID NO: 475214 - DNA, 25 bp, Artificial
  probe
  misc_feature (1)..(25): SEQ ID NO: 7699; WAN024C2J; Start 39; Stop 63
aaaagaaagtcgaaataaatttgtg

SEQ ID NO: 475215 - DNA, 25 bp, Artificial
  probe
  misc_feature (1)..(25): SEQ ID NO: 7700; WAN024BOA; Start 294; Stop 318
tgatggtgagatattcagtcaagaa

SEQ ID NO: 475216 - DNA, 25 bp, Artificial
  probe
  misc_feature (1)..(25): SEQ ID NO: 7700; WAN024BOA; Start 293; Stop 317
atgatggtgagatattcagtcaaga

SEQ ID NO: 475217 - DNA, 25 bp, Artificial
  probe
  misc_feature (1)..(25): SEQ ID NO: 7700; WAN024BOA; Start 206; Stop 230
ttgtgacagttgataacagttggat

SEQ ID NO: 475218 - DNA, 25 bp, Artificial
  probe
  misc_feature (1)..(25): SEQ ID NO: 7700; WAN024BOA; Start 208; Stop 232
gtgacagttgataacagttggatgg

SEQ ID NO: 475219 - DNA, 25 bp, Artificial
  probe
  misc_feature (1)..(25): SEQ ID NO: 7700; WAN024BOA; Start 207; Stop 231
tgtgacagttgataacagttggatg

SEQ ID NO: 475220 - DNA, 25 bp, Artificial
  probe
  misc_feature (1)..(25): SEQ ID NO: 7700; WAN024BOA; Start 58; Stop 82
gaagtatattcagaaccgttgacta

SEQ ID NO: 475221 - DNA, 25 bp, Artificial
  probe
  misc_feature (1)..(25): SEQ ID NO: 7700; WAN024BOA; Start 292; Stop 316
tatgatggtgagatattcagtcaag

SEQ ID NO: 475222 - DNA, 25 bp, Artificial
  probe
  misc_feature (1)..(25): SEQ ID NO: 7700; WAN024BOA; Start 242; Stop 266
taaacgatgggataggagattacac

SEQ ID NO: 475223 - DNA, 25 bp, Artificial
  probe
  misc_feature (1)..(25): SEQ ID NO: 7700; WAN024BOA; Start 182; Stop 206
tatacctctatccctcgctatcttt

SEQ ID NO: 475224 - DNA, 25 bp, Artificial
  probe
  misc_feature (1)..(25): SEQ ID NO: 7700; WAN024BOA; Start 60; Stop 84
agtatattcagaaccgttgactatt

SEQ ID NO: 475225 - DNA, 25 bp, Artificial
  probe
  misc_feature (1)..(25): SEQ ID NO: 7700; WAN024BOA; Start 59; Stop 83
aagtatattcagaaccgttgactat

SEQ ID NO: 475226 - DNA, 25 bp, Artificial
  probe
  misc_feature (1)..(25): SEQ ID NO: 7700; WAN024BOA; Start 238; Stop 262
aaagtaaacgatgggataggagatt

SEQ ID NO: 475227 - DNA, 25 bp, Artificial
  probe
  misc_feature (1)..(25): SEQ ID NO: 7700; WAN024BOA; Start 181; Stop 205
atatacctctatccctcgctatctt

SEQ ID NO: 475228 - DNA, 25 bp, Artificial
  probe
  misc_feature (1)..(25): SEQ ID NO: 7700; WAN024BOA; Start 291; Stop 315
ttatgatggtgagatattcagtcaa

SEQ ID NO: 475229 - DNA, 25 bp, Artificial
  probe
  misc_feature (1)..(25): SEQ ID NO: 7700; WAN024BOA; Start 246; Stop 270
cgatgggataggagattacacaatt

SEQ ID NO: 475230 - DNA, 25 bp, Artificial
  probe
  misc_feature (1)..(25): SEQ ID NO: 7700; WAN024BOA; Start 245; Stop 269
acgatgggataggagattacacaat

SEQ ID NO: 475231 - DNA, 25 bp, Artificial
  probe
  misc_feature (1)..(25): SEQ ID NO: 7700; WAN024BOA; Start 239; Stop 263
aagtaaacgatgggataggagatta

SEQ ID NO: 475232 - DNA, 25 bp, Artificial
  probe
  misc_feature (1)..(25): SEQ ID NO: 7700; WAN024BOA; Start 244; Stop 268
aacgatgggataggagattacacaa

SEQ ID NO: 475233 - DNA, 25 bp, Artificial
  probe
  misc_feature (1)..(25): SEQ ID NO: 7700; WAN024BOA; Start 243; Stop 267
aaacgatgggataggagattacaca

SEQ ID NO: 475234 - DNA, 25 bp, Artificial
  probe
  misc_feature (1)..(25): SEQ ID NO: 7700; WAN024BOA; Start 290; Stop 314
attatgatggtgagatattcagtca

SEQ ID NO: 475235 - DNA, 25 bp, Artificial
  probe
  misc_feature (1)..(25): SEQ ID NO: 7700; WAN024BOA; Start 180; Stop 204
tatatacctctatccctcgctatct

SEQ ID NO: 475236 - DNA, 25 bp, Artificial
  probe
  misc_feature (1)..(25): SEQ ID NO: 7700; WAN024BOA; Start 205; Stop 229
tttgtgacagttgataacagttgga

SEQ ID NO: 475237 - DNA, 25 bp, Artificial
  probe
  misc_feature (1)..(25): SEQ ID NO: 7700; WAN024BOA; Start 295; Stop 319
gatggtgagatattcagtcaagaaa

SEQ ID NO: 475238 - DNA, 25 bp, Artificial
  probe
  misc_feature (1)..(25): SEQ ID NO: 7700; WAN024BOA; Start 178; Stop 202
gttatatacctctatccctcgctat

SEQ ID NO: 475239 - DNA, 25 bp, Artificial
  probe
  misc_feature (1)..(25): SEQ ID NO: 7700; WAN024BOA; Start 57; Stop 81
tgaagtatattcagaaccgttgact

SEQ ID NO: 475240 - DNA, 25 bp, Artificial
  probe
  misc_feature (1)..(25): SEQ ID NO: 7700; WAN024BOA; Start 54; Stop 78
ggatgaagtatattcagaaccgttg

SEQ ID NO: 475241 - DNA, 25 bp, Artificial
  probe
  misc_feature (1)..(25): SEQ ID NO: 7700; WAN024BOA; Start 297; Stop 321
tggtgagatattcagtcaagaaatt

SEQ ID NO: 475242 - DNA, 25 bp, Artificial
  probe
  misc_feature (1)..(25): SEQ ID NO: 7700; WAN024BOA; Start 56; Stop 80
atgaagtatattcagaaccgttgac

SEQ ID NO: 475243 - DNA, 25 bp, Artificial
  probe
  misc_feature (1)..(25): SEQ ID NO: 7700; WAN024BOA; Start 179; Stop 203
ttatatacctctatccctcgctatc

SEQ ID NO: 475244 - DNA, 25 bp, Artificial
  probe
  misc_feature (1)..(25): SEQ ID NO: 7700; WAN024BOA; Start 241; Stop 265
gtaaacgatgggataggagattaca

SEQ ID NO: 475245 - DNA, 25 bp, Artificial
  probe
  misc_feature (1)..(25): SEQ ID NO: 7700; WAN024BOA; Start 296; Stop 320
atggtgagatattcagtcaagaaat

SEQ ID NO: 475246 - DNA, 25 bp, Artificial
  probe
  misc_feature (1)..(25): SEQ ID NO: 7700; WAN024BOA; Start 240; Stop 264
agtaaacgatgggataggagattac

SEQ ID NO: 475247 - DNA, 25 bp, Artificial
  probe
  misc_feature (1)..(25): SEQ ID NO: 7700; WAN024BOA; Start 55; Stop 79
gatgaagtatattcagaaccgttga

SEQ ID NO: 475248 - DNA, 25 bp, Artificial
  probe
  misc_feature (1)..(25): SEQ ID NO: 7701; WAN024FET; Start 40; Stop 64
atttctgtaaagtctacgatactcg

SEQ ID NO: 475249 - DNA, 25 bp, Artificial
  probe
  misc_feature (1)..(25): SEQ ID NO: 7701; WAN024FET; Start 48; Stop 72
aaagtctacgatactcgatgtgttt

SEQ ID NO: 475250 - DNA, 25 bp, Artificial
  probe
  misc_feature (1)..(25): SEQ ID NO: 7701; WAN024FET; Start 46; Stop 70
gtaaagtctacgatactcgatgtgt

SEQ ID NO: 475251 - DNA, 25 bp, Artificial
  probe
  misc_feature (1)..(25): SEQ ID NO: 7701; WAN024FET; Start 45; Stop 69
tgtaaagtctacgatactcgatgtg

SEQ ID NO: 475252 - DNA, 25 bp, Artificial
  probe
  misc_feature (1)..(25): SEQ ID NO: 7701; WAN024FET; Start 44; Stop 68
ctgtaaagtctacgatactcgatgt

SEQ ID NO: 475253 - DNA, 25 bp, Artificial
  probe
  misc_feature (1)..(25): SEQ ID NO: 7701; WAN024FET; Start 43; Stop 67
tctgtaaagtctacgatactcgatg

SEQ ID NO: 475254 - DNA, 25 bp, Artificial
  probe
  misc_feature (1)..(25): SEQ ID NO: 7701; WAN024FET; Start 47; Stop 71
taaagtctacgatactcgatgtgtt

SEQ ID NO: 475255 - DNA, 25 bp, Artificial
  probe
  misc_feature (1)..(25): SEQ ID NO: 7701; WAN024FET; Start 41; Stop 65
tttctgtaaagtctacgatactcga

SEQ ID NO: 475256 - DNA, 25 bp, Artificial
  probe
  misc_feature (1)..(25): SEQ ID NO: 7701; WAN024FET; Start 42; Stop 66
ttctgtaaagtctacgatactcgat

SEQ ID NO: 475257 - DNA, 25 bp, Artificial
  probe
  misc_feature (1)..(25): SEQ ID NO: 7701; WAN024FET; Start 39; Stop 63
tatttctgtaaagtctacgatactc

SEQ ID NO: 475258 - DNA, 25 bp, Artificial
  probe
  misc_feature (1)..(25): SEQ ID NO: 7701; WAN024FET; Start 38; Stop 62
ttatttctgtaaagtctacgatact

SEQ ID NO: 475259 - DNA, 25 bp, Artificial
  probe
  misc_feature (1)..(25): SEQ ID NO: 7701; WAN024FET; Start 49; Stop 73
aagtctacgatactcgatgtgtttt

SEQ ID NO: 475260 - DNA, 25 bp, Artificial
  probe
  misc_feature (1)..(25): SEQ ID NO: 7701; WAN024FET; Start 34; Stop 58
tcttttatttctgtaaagtctacga

SEQ ID NO: 475261 - DNA, 25 bp, Artificial
  probe
  misc_feature (1)..(25): SEQ ID NO: 7701; WAN024FET; Start 33; Stop 57
ttcttttatttctgtaaagtctacg

SEQ ID NO: 475262 - DNA, 25 bp, Artificial
  probe
  misc_feature (1)..(25): SEQ ID NO: 7701; WAN024FET; Start 35; Stop 59
cttttatttctgtaaagtctacgat

SEQ ID NO: 475263 - DNA, 25 bp, Artificial
  probe
  misc_feature (1)..(25): SEQ ID NO: 7702; WAN024B6B; Start 166; Stop 190
ttagaagttaagtattcctctgtcg

SEQ ID NO: 475264 - DNA, 25 bp, Artificial
  probe
  misc_feature (1)..(25): SEQ ID NO: 7702; WAN024B6B; Start 171; Stop 195
agttaagtattcctctgtcgaagaa

SEQ ID NO: 475265 - DNA, 25 bp, Artificial
  probe
  misc_feature (1)..(25): SEQ ID NO: 7702; WAN024B6B; Start 170; Stop 194
aagttaagtattcctctgtcgaaga

SEQ ID NO: 475266 - DNA, 25 bp, Artificial
  probe
  misc_feature (1)..(25): SEQ ID NO: 7702; WAN024B6B; Start 169; Stop 193
gaagttaagtattcctctgtcgaag

SEQ ID NO: 475267 - DNA, 25 bp, Artificial
  probe
  misc_feature (1)..(25): SEQ ID NO: 7702; WAN024B6B; Start 168; Stop 192
agaagttaagtattcctctgtcgaa

SEQ ID NO: 475268 - DNA, 25 bp, Artificial
  probe
  misc_feature (1)..(25): SEQ ID NO: 7702; WAN024B6B; Start 167; Stop 191
tagaagttaagtattcctctgtcga

SEQ ID NO: 475269 - DNA, 25 bp, Artificial
  probe
  misc_feature (1)..(25): SEQ ID NO: 7702; WAN024B6B; Start 164; Stop 188
agttagaagttaagtattcctctgt

SEQ ID NO: 475270 - DNA, 25 bp, Artificial
  probe
  misc_feature (1)..(25): SEQ ID NO: 7702; WAN024B6B; Start 176; Stop 200
agtattcctctgtcgaagaattgtt

SEQ ID NO: 475271 - DNA, 25 bp, Artificial
  probe
  misc_feature (1)..(25): SEQ ID NO: 7702; WAN024B6B; Start 175; Stop 199
aagtattcctctgtcgaagaattgt

SEQ ID NO: 475272 - DNA, 25 bp, Artificial
  probe
  misc_feature (1)..(25): SEQ ID NO: 7702; WAN024B6B; Start 165; Stop 189
gttagaagttaagtattcctctgtc

SEQ ID NO: 475273 - DNA, 25 bp, Artificial
  probe
  misc_feature (1)..(25): SEQ ID NO: 7702; WAN024B6B; Start 174; Stop 198
taagtattcctctgtcgaagaattg

SEQ ID NO: 475274 - DNA, 25 bp, Artificial
  probe
  misc_feature (1)..(25): SEQ ID NO: 7702; WAN024B6B; Start 172; Stop 196
gttaagtattcctctgtcgaagaat

SEQ ID NO: 475275 - DNA, 25 bp, Artificial
  probe
  misc_feature (1)..(25): SEQ ID NO: 7702; WAN024B6B; Start 162; Stop 186
tgagttagaagttaagtattcctct

SEQ ID NO: 475276 - DNA, 25 bp, Artificial
  probe
  misc_feature (1)..(25): SEQ ID NO: 7702; WAN024B6B; Start 163; Stop 187
gagttagaagttaagtattcctctg

SEQ ID NO: 475277 - DNA, 25 bp, Artificial
  probe
  misc_feature (1)..(25): SEQ ID NO: 7702; WAN024B6B; Start 173; Stop 197
ttaagtattcctctgtcgaagaatt

SEQ ID NO: 475278 - DNA, 25 bp, Artificial
  probe
  misc_feature (1)..(25): SEQ ID NO: 7702; WAN024B6B; Start 161; Stop 185
ttgagttagaagttaagtattcctc

SEQ ID NO: 475279 - DNA, 25 bp, Artificial
  probe
  misc_feature (1)..(25): SEQ ID NO: 7702; WAN024B6B; Start 181; Stop 205
tcctctgtcgaagaattgtttataa

SEQ ID NO: 475280 - DNA, 25 bp, Artificial
  probe
  misc_feature (1)..(25): SEQ ID NO: 7702; WAN024B6B; Start 180; Stop 204
ttcctctgtcgaagaattgtttata

SEQ ID NO: 475281 - DNA, 25 bp, Artificial
  probe
  misc_feature (1)..(25): SEQ ID NO: 7702; WAN024B6B; Start 177; Stop 201
gtattcctctgtcgaagaattgttt

SEQ ID NO: 475282 - DNA, 25 bp, Artificial
  probe
  misc_feature (1)..(25): SEQ ID NO: 7702; WAN024B6B; Start 179; Stop 203
attcctctgtcgaagaattgtttat

SEQ ID NO: 475283 - DNA, 25 bp, Artificial
  probe
  misc_feature (1)..(25): SEQ ID NO: 7702; WAN024B6B; Start 160; Stop 184
attgagttagaagttaagtattcct

SEQ ID NO: 475284 - DNA, 25 bp, Artificial
  probe
  misc_feature (1)..(25): SEQ ID NO: 7702; WAN024B6B; Start 182; Stop 206
cctctgtcgaagaattgtttataat

SEQ ID NO: 475285 - DNA, 25 bp, Artificial
  probe
  misc_feature (1)..(25): SEQ ID NO: 7702; WAN024B6B; Start 178; Stop 202
tattcctctgtcgaagaattgttta

SEQ ID NO: 475286 - DNA, 25 bp, Artificial
  probe
  misc_feature (1)..(25): SEQ ID NO: 7702; WAN024B6B; Start 183; Stop 207
ctctgtcgaagaattgtttataata

SEQ ID NO: 475287 - DNA, 25 bp, Artificial
  probe
  misc_feature (1)..(25): SEQ ID NO: 7703; WAN024BZ4; Start 55; Stop 79
aactacaagattggcgagatagaac

SEQ ID NO: 475288 - DNA, 25 bp, Artificial
  probe
  misc_feature (1)..(25): SEQ ID NO: 7703; WAN024BZ4; Start 235; Stop 259
tggaatcagacagagaatcataaga

SEQ ID NO: 475289 - DNA, 25 bp, Artificial
  probe
  misc_feature (1)..(25): SEQ ID NO: 7703; WAN024BZ4; Start 230; Stop 254
tagaatggaatcagacagagaatca

SEQ ID NO: 475290 - DNA, 25 bp, Artificial
  probe
  misc_feature (1)..(25): SEQ ID NO: 7703; WAN024BZ4; Start 231; Stop 255
agaatggaatcagacagagaatcat

SEQ ID NO: 475291 - DNA, 25 bp, Artificial
  probe
  misc_feature (1)..(25): SEQ ID NO: 7703; WAN024BZ4; Start 41; Stop 65
gcaatccttcatccaactacaagat

SEQ ID NO: 475292 - DNA, 25 bp, Artificial
  probe
  misc_feature (1)..(25): SEQ ID NO: 7703; WAN024BZ4; Start 54; Stop 78
caactacaagattggcgagatagaa

SEQ ID NO: 475293 - DNA, 25 bp, Artificial
  probe
  misc_feature (1)..(25): SEQ ID NO: 7703; WAN024BZ4; Start 236; Stop 260
ggaatcagacagagaatcataagaa

SEQ ID NO: 475294 - DNA, 25 bp, Artificial
  probe
  misc_feature (1)..(25): SEQ ID NO: 7703; WAN024BZ4; Start 229; Stop 253
ttagaatggaatcagacagagaatc

SEQ ID NO: 475295 - DNA, 25 bp, Artificial
  probe
  misc_feature (1)..(25): SEQ ID NO: 7703; WAN024BZ4; Start 234; Stop 258
atggaatcagacagagaatcataag

SEQ ID NO: 475296 - DNA, 25 bp, Artificial
  probe
  misc_feature (1)..(25): SEQ ID NO: 7703; WAN024BZ4; Start 232; Stop 256
gaatggaatcagacagagaatcata

SEQ ID NO: 475297 - DNA, 25 bp, Artificial
  probe
  misc_feature (1)..(25): SEQ ID NO: 7703; WAN024BZ4; Start 233; Stop 257
aatggaatcagacagagaatcataa

SEQ ID NO: 475298 - DNA, 25 bp, Artificial
  probe
  misc_feature (1)..(25): SEQ ID NO: 7703; WAN024BZ4; Start 56; Stop 80
actacaagattggcgagatagaacg

SEQ ID NO: 475299 - DNA, 25 bp, Artificial
  probe
  misc_feature (1)..(25): SEQ ID NO: 7703; WAN024BZ4; Start 112; Stop 136
aactatgggctttctacaccttatc

SEQ ID NO: 475300 - DNA, 25 bp, Artificial
  probe
  misc_feature (1)..(25): SEQ ID NO: 7703; WAN024BZ4; Start 43; Stop 67
aatccttcatccaactacaagattg

SEQ ID NO: 475301 - DNA, 25 bp, Artificial
  probe
  misc_feature (1)..(25): SEQ ID NO: 7703; WAN024BZ4; Start 42; Stop 66
caatccttcatccaactacaagatt

SEQ ID NO: 475302 - DNA, 25 bp, Artificial
  probe
  misc_feature (1)..(25): SEQ ID NO: 7703; WAN024BZ4; Start 226; Stop 250
gctttagaatggaatcagacagaga

SEQ ID NO: 475303 - DNA, 25 bp, Artificial
  probe
  misc_feature (1)..(25): SEQ ID NO: 7703; WAN024BZ4; Start 222; Stop 246
attggctttagaatggaatcagaca

SEQ ID NO: 475304 - DNA, 25 bp, Artificial
  probe
  misc_feature (1)..(25): SEQ ID NO: 7703; WAN024BZ4; Start 79; Stop 103
cgttacgatgaacatcctatagtga

SEQ ID NO: 475305 - DNA, 25 bp, Artificial
  probe
  misc_feature (1)..(25): SEQ ID NO: 7703; WAN024BZ4; Start 109; Stop 133
tttaactatgggctttctacacctt

SEQ ID NO: 475306 - DNA, 25 bp, Artificial
  probe
  misc_feature (1)..(25): SEQ ID NO: 7703; WAN024BZ4; Start 83; Stop 107
acgatgaacatcctatagtgaagtt

SEQ ID NO: 475307 - DNA, 25 bp, Artificial
  probe
  misc_feature (1)..(25): SEQ ID NO: 7703; WAN024BZ4; Start 82; Stop 106
tacgatgaacatcctatagtgaagt

SEQ ID NO: 475308 - DNA, 25 bp, Artificial
  probe
  misc_feature (1)..(25): SEQ ID NO: 7703; WAN024BZ4; Start 78; Stop 102
acgttacgatgaacatcctatagtg

SEQ ID NO: 475309 - DNA, 25 bp, Artificial
  probe
  misc_feature (1)..(25): SEQ ID NO: 7703; WAN024BZ4; Start 223; Stop 247
ttggctttagaatggaatcagacag

SEQ ID NO: 475310 - DNA, 25 bp, Artificial
  probe
  misc_feature (1)..(25): SEQ ID NO: 7703; WAN024BZ4; Start 111; Stop 135
taactatgggctttctacaccttat

SEQ ID NO: 475311 - DNA, 25 bp, Artificial
  probe
  misc_feature (1)..(25): SEQ ID NO: 7703; WAN024BZ4; Start 110; Stop 134
ttaactatgggctttctacacctta

SEQ ID NO: 475312 - DNA, 25 bp, Artificial
  probe
  misc_feature (1)..(25): SEQ ID NO: 7703; WAN024BZ4; Start 143; Stop 167
acgatattgcagtgtccattaatac

SEQ ID NO: 475313 - DNA, 25 bp, Artificial
  probe
  misc_feature (1)..(25): SEQ ID NO: 7703; WAN024BZ4; Start 38; Stop 62
aatgcaatccttcatccaactacaa

SEQ ID NO: 475314 - DNA, 25 bp, Artificial
  probe
  misc_feature (1)..(25): SEQ ID NO: 7703; WAN024BZ4; Start 225; Stop 249
ggctttagaatggaatcagacagag

SEQ ID NO: 475315 - DNA, 25 bp, Artificial
  probe
  misc_feature (1)..(25): SEQ ID NO: 7703; WAN024BZ4; Start 115; Stop 139
tatgggctttctacaccttatcctc

SEQ ID NO: 475316 - DNA, 25 bp, Artificial
  probe
  misc_feature (1)..(25): SEQ ID NO: 7703; WAN024BZ4; Start 114; Stop 138
ctatgggctttctacaccttatcct

SEQ ID NO: 475317 - DNA, 25 bp, Artificial
  probe
  misc_feature (1)..(25): SEQ ID NO: 7703; WAN024BZ4; Start 299; Stop 323
gtcaaatgtcattagagcaaaggtt

SEQ ID NO: 475318 - DNA, 25 bp, Artificial
  probe
  misc_feature (1)..(25): SEQ ID NO: 7703; WAN024BZ4; Start 300; Stop 324
tcaaatgtcattagagcaaaggttt

SEQ ID NO: 475319 - DNA, 25 bp, Artificial
  probe
  misc_feature (1)..(25): SEQ ID NO: 7703; WAN024BZ4; Start 39; Stop 63
atgcaatccttcatccaactacaag

SEQ ID NO: 475320 - DNA, 25 bp, Artificial
  probe
  misc_feature (1)..(25): SEQ ID NO: 7704; WAN024F6C; Start 14; Stop 38
atttgactgtcctgaacgatttatc

SEQ ID NO: 475321 - DNA, 25 bp, Artificial
  probe
  misc_feature (1)..(25): SEQ ID NO: 7704; WAN024F6C; Start 13; Stop 37
gatttgactgtcctgaacgatttat

SEQ ID NO: 475322 - DNA, 25 bp, Artificial
  probe
  misc_feature (1)..(25): SEQ ID NO: 7704; WAN024F6C; Start 15; Stop 39
tttgactgtcctgaacgatttatcc

SEQ ID NO: 475323 - DNA, 25 bp, Artificial
  probe
  misc_feature (1)..(25): SEQ ID NO: 7704; WAN024F6C; Start 12; Stop 36
cgatttgactgtcctgaacgattta

SEQ ID NO: 475324 - DNA, 25 bp, Artificial
  probe
  misc_feature (1)..(25): SEQ ID NO: 7704; WAN024F6C; Start 16; Stop 40
ttgactgtcctgaacgatttatcct

SEQ ID NO: 475325 - DNA, 25 bp, Artificial
  probe
  misc_feature (1)..(25): SEQ ID NO: 7704; WAN024F6C; Start 19; Stop 43
actgtcctgaacgatttatcctgtt

SEQ ID NO: 475326 - DNA, 25 bp, Artificial
  probe
  misc_feature (1)..(25): SEQ ID NO: 7704; WAN024F6C; Start 18; Stop 42
gactgtcctgaacgatttatcctgt

SEQ ID NO: 475327 - DNA, 25 bp, Artificial
  probe
  misc_feature (1)..(25): SEQ ID NO: 7704; WAN024F6C; Start 74; Stop 98
ttgtagataaggcgaagctgatgtg

SEQ ID NO: 475328 - DNA, 25 bp, Artificial
  probe
  misc_feature (1)..(25): SEQ ID NO: 7704; WAN024F6C; Start 73; Stop 97
gttgtagataaggcgaagctgatgt

SEQ ID NO: 475329 - DNA, 25 bp, Artificial
  probe
  misc_feature (1)..(25): SEQ ID NO: 7704; WAN024F6C; Start 88; Stop 112
aagctgatgtggtttgaagagattt

SEQ ID NO: 475330 - DNA, 25 bp, Artificial
  probe
  misc_feature (1)..(25): SEQ ID NO: 7704; WAN024F6C; Start 87; Stop 111
gaagctgatgtggtttgaagagatt

SEQ ID NO: 475331 - DNA, 25 bp, Artificial
  probe
  misc_feature (1)..(25): SEQ ID NO: 7704; WAN024F6C; Start 72; Stop 96
ggttgtagataaggcgaagctgatg

SEQ ID NO: 475332 - DNA, 25 bp, Artificial
  probe
  misc_feature (1)..(25): SEQ ID NO: 7704; WAN024F6C; Start 71; Stop 95
aggttgtagataaggcgaagctgat

SEQ ID NO: 475333 - DNA, 25 bp, Artificial
  probe
  misc_feature (1)..(25): SEQ ID NO: 7704; WAN024F6C; Start 155; Stop 179
tgaccttttctgaccaatgtagtat

SEQ ID NO: 475334 - DNA, 25 bp, Artificial
  probe
  misc_feature (1)..(25): SEQ ID NO: 7704; WAN024F6C; Start 28; Stop 52
aacgatttatcctgttcttatttca

SEQ ID NO: 475335 - DNA, 25 bp, Artificial
  probe
  misc_feature (1)..(25): SEQ ID NO: 7704; WAN024F6C; Start 29; Stop 53
acgatttatcctgttcttatttcat

SEQ ID NO: 475336 - DNA, 25 bp, Artificial
  probe
  misc_feature (1)..(25): SEQ ID NO: 7704; WAN024F6C; Start 91; Stop 115
ctgatgtggtttgaagagattttcg

SEQ ID NO: 475337 - DNA, 25 bp, Artificial
  probe
  misc_feature (1)..(25): SEQ ID NO: 7704; WAN024F6C; Start 77; Stop 101
tagataaggcgaagctgatgtggtt

SEQ ID NO: 475338 - DNA, 25 bp, Artificial
  probe
  misc_feature (1)..(25): SEQ ID NO: 7704; WAN024F6C; Start 90; Stop 114
gctgatgtggtttgaagagattttc

SEQ ID NO: 475339 - DNA, 25 bp, Artificial
  probe
  misc_feature (1)..(25): SEQ ID NO: 7704; WAN024F6C; Start 154; Stop 178
ttgaccttttctgaccaatgtagta

SEQ ID NO: 475340 - DNA, 25 bp, Artificial
  probe
  misc_feature (1)..(25): SEQ ID NO: 7704; WAN024F6C; Start 151; Stop 175
tacttgaccttttctgaccaatgta

SEQ ID NO: 475341 - DNA, 25 bp, Artificial
  probe
  misc_feature (1)..(25): SEQ ID NO: 7704; WAN024F6C; Start 150; Stop 174
atacttgaccttttctgaccaatgt

SEQ ID NO: 475342 - DNA, 25 bp, Artificial
  probe
  misc_feature (1)..(25): SEQ ID NO: 7704; WAN024F6C; Start 149; Stop 173
aatacttgaccttttctgaccaatg

SEQ ID NO: 475343 - DNA, 25 bp, Artificial
  probe
  misc_feature (1)..(25): SEQ ID NO: 7704; WAN024F6C; Start 153; Stop 177
cttgaccttttctgaccaatgtagt

SEQ ID NO: 475344 - DNA, 25 bp, Artificial
  probe
  misc_feature (1)..(25): SEQ ID NO: 7704; WAN024F6C; Start 152; Stop 176
acttgaccttttctgaccaatgtag

SEQ ID NO: 475345 - DNA, 25 bp, Artificial
  probe
  misc_feature (1)..(25): SEQ ID NO: 7704; WAN024F6C; Start 61; Stop 85
tacagtttcgaggttgtagataagg

SEQ ID NO: 475346 - DNA, 25 bp, Artificial
  probe
  misc_feature (1)..(25): SEQ ID NO: 7704; WAN024F6C; Start 148; Stop 172
aaatacttgaccttttctgaccaat

SEQ ID NO: 475347 - DNA, 25 bp, Artificial
  probe
  misc_feature (1)..(25): SEQ ID NO: 7704; WAN024F6C; Start 57; Stop 81
actatacagtttcgaggttgtagat

SEQ ID NO: 475348 - DNA, 25 bp, Artificial
  probe
  misc_feature (1)..(25): SEQ ID NO: 7704; WAN024F6C; Start 156; Stop 180
gaccttttctgaccaatgtagtata

SEQ ID NO: 475349 - DNA, 25 bp, Artificial
  probe
  misc_feature (1)..(25): SEQ ID NO: 7704; WAN024F6C; Start 70; Stop 94
gaggttgtagataaggcgaagctga

SEQ ID NO: 475350 - DNA, 25 bp, Artificial
  probe
  misc_feature (1)..(25): SEQ ID NO: 7704; WAN024F6C; Start 62; Stop 86
acagtttcgaggttgtagataaggc

SEQ ID NO: 475351 - DNA, 25 bp, Artificial
  probe
  misc_feature (1)..(25): SEQ ID NO: 7704; WAN024F6C; Start 56; Stop 80
tactatacagtttcgaggttgtaga

SEQ ID NO: 475352 - DNA, 25 bp, Artificial
  probe
  misc_feature (1)..(25): SEQ ID NO: 7704; WAN024F6C; Start 146; Stop 170
caaaatacttgaccttttctgacca

SEQ ID NO: 475353 - DNA, 25 bp, Artificial
  probe
  misc_feature (1)..(25): SEQ ID NO: 7705; WAN024B6K; Start 70; Stop 94
gagactgtttacattttcagcaagc

SEQ ID NO: 475354 - DNA, 25 bp, Artificial
  probe
  misc_feature (1)..(25): SEQ ID NO: 7705; WAN024B6K; Start 75; Stop 99
tgtttacattttcagcaagctaact

SEQ ID NO: 475355 - DNA, 25 bp, Artificial
  probe
  misc_feature (1)..(25): SEQ ID NO: 7705; WAN024B6K; Start 72; Stop 96
gactgtttacattttcagcaagcta

SEQ ID NO: 475356 - DNA, 25 bp, Artificial
  probe
  misc_feature (1)..(25): SEQ ID NO: 7705; WAN024B6K; Start 73; Stop 97
actgtttacattttcagcaagctaa

SEQ ID NO: 475357 - DNA, 25 bp, Artificial
  probe
  misc_feature (1)..(25): SEQ ID NO: 7705; WAN024B6K; Start 74; Stop 98
ctgtttacattttcagcaagctaac

SEQ ID NO: 475358 - DNA, 25 bp, Artificial
  probe
  misc_feature (1)..(25): SEQ ID NO: 7705; WAN024B6K; Start 76; Stop 100
gtttacattttcagcaagctaacta

SEQ ID NO: 475359 - DNA, 25 bp, Artificial
  probe
  misc_feature (1)..(25): SEQ ID NO: 7705; WAN024B6K; Start 71; Stop 95
agactgtttacattttcagcaagct

SEQ ID NO: 475360 - DNA, 25 bp, Artificial
  probe
  misc_feature (1)..(25): SEQ ID NO: 7705; WAN024B6K; Start 77; Stop 101
tttacattttcagcaagctaactaa

SEQ ID NO: 475361 - DNA, 25 bp, Artificial
  probe
  misc_feature (1)..(25): SEQ ID NO: 7705; WAN024B6K; Start 78; Stop 102
ttacattttcagcaagctaactaat

SEQ ID NO: 475362 - DNA, 25 bp, Artificial
  probe
  misc_feature (1)..(25): SEQ ID NO: 7706; WAN024F6I; Start 29; Stop 53
tcgttttgtcctattcttgtttcat

SEQ ID NO: 475363 - DNA, 25 bp, Artificial
  probe
  misc_feature (1)..(25): SEQ ID NO: 7706; WAN024F6I; Start 28; Stop 52
atcgttttgtcctattcttgtttca

SEQ ID NO: 475364 - DNA, 25 bp, Artificial
  probe
  misc_feature (1)..(25): SEQ ID NO: 7706; WAN024F6I; Start 30; Stop 54
cgttttgtcctattcttgtttcatt

SEQ ID NO: 475365 - DNA, 25 bp, Artificial
  probe
  misc_feature (1)..(25): SEQ ID NO: 7706; WAN024F6I; Start 25; Stop 49
ctgatcgttttgtcctattcttgtt

SEQ ID NO: 475366 - DNA, 25 bp, Artificial
  probe
  misc_feature (1)..(25): SEQ ID NO: 7706; WAN024F6I; Start 26; Stop 50
tgatcgttttgtcctattcttgttt

SEQ ID NO: 475367 - DNA, 25 bp, Artificial
  probe
  misc_feature (1)..(25): SEQ ID NO: 7706; WAN024F6I; Start 23; Stop 47
tcctgatcgttttgtcctattcttg

SEQ ID NO: 475368 - DNA, 25 bp, Artificial
  probe
  misc_feature (1)..(25): SEQ ID NO: 7706; WAN024F6I; Start 22; Stop 46
gtcctgatcgttttgtcctattctt

SEQ ID NO: 475369 - DNA, 25 bp, Artificial
  probe
  misc_feature (1)..(25): SEQ ID NO: 7706; WAN024F6I; Start 24; Stop 48
cctgatcgttttgtcctattcttgt

SEQ ID NO: 475370 - DNA, 25 bp, Artificial
  probe
  misc_feature (1)..(25): SEQ ID NO: 7706; WAN024F6I; Start 27; Stop 51
gatcgttttgtcctattcttgtttc

SEQ ID NO: 475371 - DNA, 25 bp, Artificial
  probe
  misc_feature (1)..(25): SEQ ID NO: 7706; WAN024F6I; Start 20; Stop 44
ctgtcctgatcgttttgtcctattc

SEQ ID NO: 475372 - DNA, 25 bp, Artificial
  probe
  misc_feature (1)..(25): SEQ ID NO: 7706; WAN024F6I; Start 21; Stop 45
tgtcctgatcgttttgtcctattct

SEQ ID NO: 475373 - DNA, 25 bp, Artificial
  probe
  misc_feature (1)..(25): SEQ ID NO: 7706; WAN024F6I; Start 13; Stop 37
gatttgactgtcctgatcgttttgt

SEQ ID NO: 475374 - DNA, 25 bp, Artificial
  probe
  misc_feature (1)..(25): SEQ ID NO: 7706; WAN024F6I; Start 19; Stop 43
actgtcctgatcgttttgtcctatt

SEQ ID NO: 475375 - DNA, 25 bp, Artificial
  probe
  misc_feature (1)..(25): SEQ ID NO: 7706; WAN024F6I; Start 14; Stop 38
atttgactgtcctgatcgttttgtc

SEQ ID NO: 475376 - DNA, 25 bp, Artificial
  probe
  misc_feature (1)..(25): SEQ ID NO: 7706; WAN024F6I; Start 31; Stop 55
gttttgtcctattcttgtttcattt

SEQ ID NO: 475377 - DNA, 25 bp, Artificial
  probe
  misc_feature (1)..(25): SEQ ID NO: 7706; WAN024F6I; Start 18; Stop 42
gactgtcctgatcgttttgtcctat

SEQ ID NO: 475378 - DNA, 25 bp, Artificial
  probe
  misc_feature (1)..(25): SEQ ID NO: 7706; WAN024F6I; Start 35; Stop 59
tgtcctattcttgtttcattttact

SEQ ID NO: 475379 - DNA, 25 bp, Artificial
  probe
  misc_feature (1)..(25): SEQ ID NO: 7706; WAN024F6I; Start 63; Stop 87
tttccatgataaaacgcatagtatc

SEQ ID NO: 475380 - DNA, 25 bp, Artificial
  probe
  misc_feature (1)..(25): SEQ ID NO: 7706; WAN024F6I; Start 62; Stop 86
atttccatgataaaacgcatagtat

SEQ ID NO: 475381 - DNA, 25 bp, Artificial
  probe
  misc_feature (1)..(25): SEQ ID NO: 7706; WAN024F6I; Start 60; Stop 84
atatttccatgataaaacgcatagt

SEQ ID NO: 475382 - DNA, 25 bp, Artificial
  probe
  misc_feature (1)..(25): SEQ ID NO: 7706; WAN024F6I; Start 57; Stop 81
actatatttccatgataaaacgcat

SEQ ID NO: 475383 - DNA, 25 bp, Artificial
  probe
  misc_feature (1)..(25): SEQ ID NO: 7706; WAN024F6I; Start 32; Stop 56
ttttgtcctattcttgtttcatttt

SEQ ID NO: 475384 - DNA, 25 bp, Artificial
  probe
  misc_feature (1)..(25): SEQ ID NO: 7706; WAN024F6I; Start 34; Stop 58
ttgtcctattcttgtttcattttac

SEQ ID NO: 475385 - DNA, 25 bp, Artificial
  probe
  misc_feature (1)..(25): SEQ ID NO: 7706; WAN024F6I; Start 56; Stop 80
tactatatttccatgataaaacgca

SEQ ID NO: 475386 - DNA, 25 bp, Artificial
  probe
  misc_feature (1)..(25): SEQ ID NO: 7706; WAN024F6I; Start 61; Stop 85
tatttccatgataaaacgcatagta

SEQ ID NO: 475387 - DNA, 25 bp, Artificial
  probe
  misc_feature (1)..(25): SEQ ID NO: 7706; WAN024F6I; Start 17; Stop 41
tgactgtcctgatcgttttgtccta

SEQ ID NO: 475388 - DNA, 25 bp, Artificial
  probe
  misc_feature (1)..(25): SEQ ID NO: 7706; WAN024F6I; Start 15; Stop 39
tttgactgtcctgatcgttttgtcc

SEQ ID NO: 475389 - DNA, 25 bp, Artificial
  probe
  misc_feature (1)..(25): SEQ ID NO: 7706; WAN024F6I; Start 33; Stop 57
tttgtcctattcttgtttcatttta

SEQ ID NO: 475390 - DNA, 25 bp, Artificial
  probe
  misc_feature (1)..(25): SEQ ID NO: 7706; WAN024F6I; Start 65; Stop 89
tccatgataaaacgcatagtatcaa

SEQ ID NO: 475391 - DNA, 25 bp, Artificial
  probe
  misc_feature (1)..(25): SEQ ID NO: 7706; WAN024F6I; Start 64; Stop 88
ttccatgataaaacgcatagtatca

SEQ ID NO: 475392 - DNA, 25 bp, Artificial
  probe
  misc_feature (1)..(25): SEQ ID NO: 7706; WAN024F6I; Start 55; Stop 79
ttactatatttccatgataaaacgc

SEQ ID NO: 475393 - DNA, 25 bp, Artificial
  probe
  misc_feature (1)..(25): SEQ ID NO: 7706; WAN024F6I; Start 16; Stop 40
ttgactgtcctgatcgttttgtcct

SEQ ID NO: 475394 - DNA, 25 bp, Artificial
  probe
  misc_feature (1)..(25): SEQ ID NO: 7706; WAN024F6I; Start 66; Stop 90
ccatgataaaacgcatagtatcaag

SEQ ID NO: 475395 - DNA, 25 bp, Artificial
  probe
  misc_feature (1)..(25): SEQ ID NO: 7707; WAN024F75; Start 18; Stop 42
gactgtcctgatctattcgttctat

SEQ ID NO: 475396 - DNA, 25 bp, Artificial
  probe
  misc_feature (1)..(25): SEQ ID NO: 7707; WAN024F75; Start 17; Stop 41
tgactgtcctgatctattcgttcta

SEQ ID NO: 475397 - DNA, 25 bp, Artificial
  probe
  misc_feature (1)..(25): SEQ ID NO: 7707; WAN024F75; Start 19; Stop 43
actgtcctgatctattcgttctatt

SEQ ID NO: 475398 - DNA, 25 bp, Artificial
  probe
  misc_feature (1)..(25): SEQ ID NO: 7707; WAN024F75; Start 21; Stop 45
tgtcctgatctattcgttctattct

SEQ ID NO: 475399 - DNA, 25 bp, Artificial
  probe
  misc_feature (1)..(25): SEQ ID NO: 7707; WAN024F75; Start 16; Stop 40
ttgactgtcctgatctattcgttct

SEQ ID NO: 475400 - DNA, 25 bp, Artificial
  probe
  misc_feature (1)..(25): SEQ ID NO: 7707; WAN024F75; Start 20; Stop 44
ctgtcctgatctattcgttctattc

SEQ ID NO: 475401 - DNA, 25 bp, Artificial
  probe
  misc_feature (1)..(25): SEQ ID NO: 7707; WAN024F75; Start 22; Stop 46
gtcctgatctattcgttctattctt

SEQ ID NO: 475402 - DNA, 25 bp, Artificial
  probe
  misc_feature (1)..(25): SEQ ID NO: 7707; WAN024F75; Start 14; Stop 38
atttgactgtcctgatctattcgtt

SEQ ID NO: 475403 - DNA, 25 bp, Artificial
  probe
  misc_feature (1)..(25): SEQ ID NO: 7707; WAN024F75; Start 15; Stop 39
tttgactgtcctgatctattcgttc

SEQ ID NO: 475404 - DNA, 25 bp, Artificial
  probe
  misc_feature (1)..(25): SEQ ID NO: 7707; WAN024F75; Start 13; Stop 37
gatttgactgtcctgatctattcgt

SEQ ID NO: 475405 - DNA, 25 bp, Artificial
  probe
  misc_feature (1)..(25): SEQ ID NO: 7707; WAN024F75; Start 23; Stop 47
tcctgatctattcgttctattctta

SEQ ID NO: 475406 - DNA, 25 bp, Artificial
  probe
  misc_feature (1)..(25): SEQ ID NO: 7707; WAN024F75; Start 11; Stop 35
tcgatttgactgtcctgatctattc

SEQ ID NO: 475407 - DNA, 25 bp, Artificial
  probe
  misc_feature (1)..(25): SEQ ID NO: 7707; WAN024F75; Start 24; Stop 48
cctgatctattcgttctattcttat

SEQ ID NO: 475408 - DNA, 25 bp, Artificial
  probe
  misc_feature (1)..(25): SEQ ID NO: 7707; WAN024F75; Start 12; Stop 36
cgatttgactgtcctgatctattcg

SEQ ID NO: 475409 - DNA, 25 bp, Artificial
  probe
  misc_feature (1)..(25): SEQ ID NO: 7707; WAN024F75; Start 10; Stop 34
atcgatttgactgtcctgatctatt

SEQ ID NO: 475410 - DNA, 25 bp, Artificial
  probe
  misc_feature (1)..(25): SEQ ID NO: 7707; WAN024F75; Start 57; Stop 81
actatattttggtgcaataagtgaa

SEQ ID NO: 475411 - DNA, 25 bp, Artificial
  probe
  misc_feature (1)..(25): SEQ ID NO: 7707; WAN024F75; Start 60; Stop 84
atattttggtgcaataagtgaaaag

SEQ ID NO: 475412 - DNA, 25 bp, Artificial
  probe
  misc_feature (1)..(25): SEQ ID NO: 7707; WAN024F75; Start 56; Stop 80
tactatattttggtgcaataagtga

SEQ ID NO: 475413 - DNA, 25 bp, Artificial
  probe
  misc_feature (1)..(25): SEQ ID NO: 7707; WAN024F75; Start 58; Stop 82
ctatattttggtgcaataagtgaaa

SEQ ID NO: 475414 - DNA, 25 bp, Artificial
  probe
  misc_feature (1)..(25): SEQ ID NO: 7707; WAN024F75; Start 48; Stop 72
tttcattttactatattttggtgca

SEQ ID NO: 475415 - DNA, 25 bp, Artificial
  probe
  misc_feature (1)..(25): SEQ ID NO: 7707; WAN024F75; Start 49; Stop 73
ttcattttactatattttggtgcaa

SEQ ID NO: 475416 - DNA, 25 bp, Artificial
  probe
  misc_feature (1)..(25): SEQ ID NO: 7707; WAN024F75; Start 55; Stop 79
ttactatattttggtgcaataagtg

SEQ ID NO: 475417 - DNA, 25 bp, Artificial
  probe
  misc_feature (1)..(25): SEQ ID NO: 7707; WAN024F75; Start 50; Stop 74
tcattttactatattttggtgcaat

SEQ ID NO: 475418 - DNA, 25 bp, Artificial
  probe
  misc_feature (1)..(25): SEQ ID NO: 7707; WAN024F75; Start 59; Stop 83
tatattttggtgcaataagtgaaaa

SEQ ID NO: 475419 - DNA, 25 bp, Artificial
  probe
  misc_feature (1)..(25): SEQ ID NO: 7707; WAN024F75; Start 54; Stop 78
tttactatattttggtgcaataagt

SEQ ID NO: 475420 - DNA, 25 bp, Artificial
  probe
  misc_feature (1)..(25): SEQ ID NO: 7708; WAN024B74; Start 182; Stop 206
ttaagcaggtagttgtggaggatag

SEQ ID NO: 475421 - DNA, 25 bp, Artificial
  probe
  misc_feature (1)..(25): SEQ ID NO: 7708; WAN024B74; Start 187; Stop 211
caggtagttgtggaggataggagaa

SEQ ID NO: 475422 - DNA, 25 bp, Artificial
  probe
  misc_feature (1)..(25): SEQ ID NO: 7708; WAN024B74; Start 100; Stop 124
cctgagcgaatgtatttatttggag

SEQ ID NO: 475423 - DNA, 25 bp, Artificial
  probe
  misc_feature (1)..(25): SEQ ID NO: 7708; WAN024B74; Start 226; Stop 250
attagagtagcatttaagggagagc

SEQ ID NO: 475424 - DNA, 25 bp, Artificial
  probe
  misc_feature (1)..(25): SEQ ID NO: 7708; WAN024B74; Start 101; Stop 125
ctgagcgaatgtatttatttggaga

SEQ ID NO: 475425 - DNA, 25 bp, Artificial
  probe
  misc_feature (1)..(25): SEQ ID NO: 7708; WAN024B74; Start 98; Stop 122
ttcctgagcgaatgtatttatttgg

SEQ ID NO: 475426 - DNA, 25 bp, Artificial
  probe
  misc_feature (1)..(25): SEQ ID NO: 7708; WAN024B74; Start 183; Stop 207
taagcaggtagttgtggaggatagg

SEQ ID NO: 475427 - DNA, 25 bp, Artificial
  probe
  misc_feature (1)..(25): SEQ ID NO: 7708; WAN024B74; Start 102; Stop 126
tgagcgaatgtatttatttggagaa

SEQ ID NO: 475428 - DNA, 25 bp, Artificial
  probe
  misc_feature (1)..(25): SEQ ID NO: 7708; WAN024B74; Start 181; Stop 205
tttaagcaggtagttgtggaggata

SEQ ID NO: 475429 - DNA, 25 bp, Artificial
  probe
  misc_feature (1)..(25): SEQ ID NO: 7708; WAN024B74; Start 262; Stop 286
caagaattagccctgtcagatatga

SEQ ID NO: 475430 - DNA, 25 bp, Artificial
  probe
  misc_feature (1)..(25): SEQ ID NO: 7708; WAN024B74; Start 263; Stop 287
aagaattagccctgtcagatatgaa

SEQ ID NO: 475431 - DNA, 25 bp, Artificial
  probe
  misc_feature (1)..(25): SEQ ID NO: 7708; WAN024B74; Start 264; Stop 288
agaattagccctgtcagatatgaat

SEQ ID NO: 475432 - DNA, 25 bp, Artificial
  probe
  misc_feature (1)..(25): SEQ ID NO: 7708; WAN024B74; Start 261; Stop 285
gcaagaattagccctgtcagatatg

SEQ ID NO: 475433 - DNA, 25 bp, Artificial
  probe
  misc_feature (1)..(25): SEQ ID NO: 7708; WAN024B74; Start 260; Stop 284
agcaagaattagccctgtcagatat

SEQ ID NO: 475434 - DNA, 25 bp, Artificial
  probe
  misc_feature (1)..(25): SEQ ID NO: 7708; WAN024B74; Start 180; Stop 204
atttaagcaggtagttgtggaggat

SEQ ID NO: 475435 - DNA, 25 bp, Artificial
  probe
  misc_feature (1)..(25): SEQ ID NO: 7708; WAN024B74; Start 124; Stop 148
gaatccgattattatttatggctgc

SEQ ID NO: 475436 - DNA, 25 bp, Artificial
  probe
  misc_feature (1)..(25): SEQ ID NO: 7708; WAN024B74; Start 179; Stop 203
aatttaagcaggtagttgtggagga

SEQ ID NO: 475437 - DNA, 25 bp, Artificial
  probe
  misc_feature (1)..(25): SEQ ID NO: 7708; WAN024B74; Start 125; Stop 149
aatccgattattatttatggctgcc

SEQ ID NO: 475438 - DNA, 25 bp, Artificial
  probe
  misc_feature (1)..(25): SEQ ID NO: 7708; WAN024B74; Start 188; Stop 212
aggtagttgtggaggataggagaaa

SEQ ID NO: 475439 - DNA, 25 bp, Artificial
  probe
  misc_feature (1)..(25): SEQ ID NO: 7708; WAN024B74; Start 104; Stop 128
agcgaatgtatttatttggagaatc

SEQ ID NO: 475440 - DNA, 25 bp, Artificial
  probe
  misc_feature (1)..(25): SEQ ID NO: 7708; WAN024B74; Start 103; Stop 127
gagcgaatgtatttatttggagaat

SEQ ID NO: 475441 - DNA, 25 bp, Artificial
  probe
  misc_feature (1)..(25): SEQ ID NO: 7708; WAN024B74; Start 221; Stop 245
ggtctattagagtagcatttaaggg

SEQ ID NO: 475442 - DNA, 25 bp, Artificial
  probe
  misc_feature (1)..(25): SEQ ID NO: 7708; WAN024B74; Start 259; Stop 283
gagcaagaattagccctgtcagata

SEQ ID NO: 475443 - DNA, 25 bp, Artificial
  probe
  misc_feature (1)..(25): SEQ ID NO: 7708; WAN024B74; Start 265; Stop 289
gaattagccctgtcagatatgaatt

SEQ ID NO: 475444 - DNA, 25 bp, Artificial
  probe
  misc_feature (1)..(25): SEQ ID NO: 7708; WAN024B74; Start 250; Stop 274
cttactttggagcaagaattagccc

SEQ ID NO: 475445 - DNA, 25 bp, Artificial
  probe
  misc_feature (1)..(25): SEQ ID NO: 7708; WAN024B74; Start 213; Stop 237
agtacaaaggtctattagagtagca

SEQ ID NO: 475446 - DNA, 25 bp, Artificial
  probe
  misc_feature (1)..(25): SEQ ID NO: 7708; WAN024B74; Start 99; Stop 123
tcctgagcgaatgtatttatttgga

SEQ ID NO: 475447 - DNA, 25 bp, Artificial
  probe
  misc_feature (1)..(25): SEQ ID NO: 7708; WAN024B74; Start 251; Stop 275
ttactttggagcaagaattagccct

SEQ ID NO: 475448 - DNA, 25 bp, Artificial
  probe
  misc_feature (1)..(25): SEQ ID NO: 7708; WAN024B74; Start 92; Stop 116
atcaaattcctgagcgaatgtattt

SEQ ID NO: 475449 - DNA, 25 bp, Artificial
  probe
  misc_feature (1)..(25): SEQ ID NO: 7708; WAN024B74; Start 89; Stop 113
cctatcaaattcctgagcgaatgta

SEQ ID NO: 475450 - DNA, 25 bp, Artificial
  probe
  misc_feature (1)..(25): SEQ ID NO: 7708; WAN024B74; Start 216; Stop 240
acaaaggtctattagagtagcattt

SEQ ID NO: 475451 - DNA, 25 bp, Artificial
  probe
  misc_feature (1)..(25): SEQ ID NO: 7708; WAN024B74; Start 105; Stop 129
gcgaatgtatttatttggagaatcc

SEQ ID NO: 475452 - DNA, 25 bp, Artificial
  probe
  misc_feature (1)..(25): SEQ ID NO: 7708; WAN024B74; Start 90; Stop 114
ctatcaaattcctgagcgaatgtat

SEQ ID NO: 475453 - DNA, 25 bp, Artificial
  probe
  misc_feature (1)..(25): SEQ ID NO: 7709; WAN024DLE; Start 84; Stop 108
cactctttccaatgttcactttcta

SEQ ID NO: 475454 - DNA, 25 bp, Artificial
  probe
  misc_feature (1)..(25): SEQ ID NO: 7709; WAN024DLE; Start 85; Stop 109
actctttccaatgttcactttctaa

SEQ ID NO: 475455 - DNA, 25 bp, Artificial
  probe
  misc_feature (1)..(25): SEQ ID NO: 7709; WAN024DLE; Start 4; Stop 28
ttagatttgcccacacgaacaataa

SEQ ID NO: 475456 - DNA, 25 bp, Artificial
  probe
  misc_feature (1)..(25): SEQ ID NO: 7709; WAN024DLE; Start 87; Stop 111
tctttccaatgttcactttctaact

SEQ ID NO: 475457 - DNA, 25 bp, Artificial
  probe
  misc_feature (1)..(25): SEQ ID NO: 7709; WAN024DLE; Start 86; Stop 110
ctctttccaatgttcactttctaac

SEQ ID NO: 475458 - DNA, 25 bp, Artificial
  probe
  misc_feature (1)..(25): SEQ ID NO: 7709; WAN024DLE; Start 83; Stop 107
acactctttccaatgttcactttct

SEQ ID NO: 475459 - DNA, 25 bp, Artificial
  probe
  misc_feature (1)..(25): SEQ ID NO: 7709; WAN024DLE; Start 82; Stop 106
cacactctttccaatgttcactttc

SEQ ID NO: 475460 - DNA, 25 bp, Artificial
  probe
  misc_feature (1)..(25): SEQ ID NO: 7709; WAN024DLE; Start 5; Stop 29
tagatttgcccacacgaacaataag

SEQ ID NO: 475461 - DNA, 25 bp, Artificial
  probe
  misc_feature (1)..(25): SEQ ID NO: 7709; WAN024DLE; Start 3; Stop 27
gttagatttgcccacacgaacaata

SEQ ID NO: 475462 - DNA, 25 bp, Artificial
  probe
  misc_feature (1)..(25): SEQ ID NO: 7709; WAN024DLE; Start 8; Stop 32
atttgcccacacgaacaataagaaa

SEQ ID NO: 475463 - DNA, 25 bp, Artificial
  probe
  misc_feature (1)..(25): SEQ ID NO: 7709; WAN024DLE; Start 81; Stop 105
ccacactctttccaatgttcacttt

SEQ ID NO: 475464 - DNA, 25 bp, Artificial
  probe
  misc_feature (1)..(25): SEQ ID NO: 7709; WAN024DLE; Start 7; Stop 31
gatttgcccacacgaacaataagaa

SEQ ID NO: 475465 - DNA, 25 bp, Artificial
  probe
  misc_feature (1)..(25): SEQ ID NO: 7709; WAN024DLE; Start 88; Stop 112
ctttccaatgttcactttctaacta

SEQ ID NO: 475466 - DNA, 25 bp, Artificial
  probe
  misc_feature (1)..(25): SEQ ID NO: 7709; WAN024DLE; Start 6; Stop 30
agatttgcccacacgaacaataaga

SEQ ID NO: 475467 - DNA, 25 bp, Artificial
  probe
  misc_feature (1)..(25): SEQ ID NO: 7709; WAN024DLE; Start 80; Stop 104
accacactctttccaatgttcactt

SEQ ID NO: 475468 - DNA, 25 bp, Artificial
  probe
  misc_feature (1)..(25): SEQ ID NO: 7709; WAN024DLE; Start 89; Stop 113
tttccaatgttcactttctaactaa

SEQ ID NO: 475469 - DNA, 25 bp, Artificial
  probe
  misc_feature (1)..(25): SEQ ID NO: 7709; WAN024DLE; Start 90; Stop 114
ttccaatgttcactttctaactaat

SEQ ID NO: 475470 - DNA, 25 bp, Artificial
  probe
  misc_feature (1)..(25): SEQ ID NO: 7709; WAN024DLE; Start 79; Stop 103
gaccacactctttccaatgttcact

SEQ ID NO: 475471 - DNA, 25 bp, Artificial
  probe
  misc_feature (1)..(25): SEQ ID NO: 7709; WAN024DLE; Start 32; Stop 56
aaaagaaagaaggaaaacacccagg

SEQ ID NO: 475472 - DNA, 25 bp, Artificial
  probe
  misc_feature (1)..(25): SEQ ID NO: 7709; WAN024DLE; Start 75; Stop 99
aaacgaccacactctttccaatgtt

SEQ ID NO: 475473 - DNA, 25 bp, Artificial
  probe
  misc_feature (1)..(25): SEQ ID NO: 7709; WAN024DLE; Start 36; Stop 60
gaaagaaggaaaacacccaggtaag

SEQ ID NO: 475474 - DNA, 25 bp, Artificial
  probe
  misc_feature (1)..(25): SEQ ID NO: 7709; WAN024DLE; Start 37; Stop 61
aaagaaggaaaacacccaggtaaga

SEQ ID NO: 475475 - DNA, 25 bp, Artificial
  probe
  misc_feature (1)..(25): SEQ ID NO: 7709; WAN024DLE; Start 35; Stop 59
agaaagaaggaaaacacccaggtaa

SEQ ID NO: 475476 - DNA, 25 bp, Artificial
  probe
  misc_feature (1)..(25): SEQ ID NO: 7709; WAN024DLE; Start 34; Stop 58
aagaaagaaggaaaacacccaggta

SEQ ID NO: 475477 - DNA, 25 bp, Artificial
  probe
  misc_feature (1)..(25): SEQ ID NO: 7709; WAN024DLE; Start 76; Stop 100
aacgaccacactctttccaatgttc

SEQ ID NO: 475478 - DNA, 25 bp, Artificial
  probe
  misc_feature (1)..(25): SEQ ID NO: 7709; WAN024DLE; Start 54; Stop 78
aggtaagaccaacgaaactggaaac

SEQ ID NO: 475479 - DNA, 25 bp, Artificial
  probe
  misc_feature (1)..(25): SEQ ID NO: 7709; WAN024DLE; Start 53; Stop 77
caggtaagaccaacgaaactggaaa

SEQ ID NO: 475480 - DNA, 25 bp, Artificial
  probe
  misc_feature (1)..(25): SEQ ID NO: 7709; WAN024DLE; Start 9; Stop 33
tttgcccacacgaacaataagaaaa

SEQ ID NO: 475481 - DNA, 25 bp, Artificial
  probe
  misc_feature (1)..(25): SEQ ID NO: 7709; WAN024DLE; Start 57; Stop 81
taagaccaacgaaactggaaacgac

SEQ ID NO: 475482 - DNA, 25 bp, Artificial
  probe
  misc_feature (1)..(25): SEQ ID NO: 7709; WAN024DLE; Start 56; Stop 80
gtaagaccaacgaaactggaaacga

SEQ ID NO: 475483 - DNA, 25 bp, Artificial
  probe
  misc_feature (1)..(25): SEQ ID NO: 7709; WAN024DLE; Start 38; Stop 62
aagaaggaaaacacccaggtaagac

SEQ ID NO: 475484 - DNA, 25 bp, Artificial
  probe
  misc_feature (1)..(25): SEQ ID NO: 7709; WAN024DLE; Start 33; Stop 57
aaagaaagaaggaaaacacccaggt

SEQ ID NO: 475485 - DNA, 25 bp, Artificial
  probe
  misc_feature (1)..(25): SEQ ID NO: 7709; WAN024DLE; Start 67; Stop 91
gaaactggaaacgaccacactcttt

SEQ ID NO: 475486 - DNA, 25 bp, Artificial
  probe
  misc_feature (1)..(25): SEQ ID NO: 7710; WAN024BKP; Start 110; Stop 134
tagtcaataatcctactcttgctgc

SEQ ID NO: 475487 - DNA, 25 bp, Artificial
  probe
  misc_feature (1)..(25): SEQ ID NO: 7710; WAN024BKP; Start 168; Stop 192
cgccatactaataccatacttaact

SEQ ID NO: 475488 - DNA, 25 bp, Artificial
  probe
  misc_feature (1)..(25): SEQ ID NO: 7710; WAN024BKP; Start 109; Stop 133
ttagtcaataatcctactcttgctg

SEQ ID NO: 475489 - DNA, 25 bp, Artificial
  probe
  misc_feature (1)..(25): SEQ ID NO: 7710; WAN024BKP; Start 108; Stop 132
cttagtcaataatcctactcttgct

SEQ ID NO: 475490 - DNA, 25 bp, Artificial
  probe
  misc_feature (1)..(25): SEQ ID NO: 7710; WAN024BKP; Start 107; Stop 131
tcttagtcaataatcctactcttgc

SEQ ID NO: 475491 - DNA, 25 bp, Artificial
  probe
  misc_feature (1)..(25): SEQ ID NO: 7710; WAN024BKP; Start 111; Stop 135
agtcaataatcctactcttgctgcc

SEQ ID NO: 475492 - DNA, 25 bp, Artificial
  probe
  misc_feature (1)..(25): SEQ ID NO: 7710; WAN024BKP; Start 170; Stop 194
ccatactaataccatacttaactgc

SEQ ID NO: 475493 - DNA, 25 bp, Artificial
  probe
  misc_feature (1)..(25): SEQ ID NO: 7710; WAN024BKP; Start 169; Stop 193
gccatactaataccatacttaactg

SEQ ID NO: 475494 - DNA, 25 bp, Artificial
  probe
  misc_feature (1)..(25): SEQ ID NO: 7710; WAN024BKP; Start 112; Stop 136
gtcaataatcctactcttgctgccg

SEQ ID NO: 475495 - DNA, 25 bp, Artificial
  probe
  misc_feature (1)..(25): SEQ ID NO: 7710; WAN024BKP; Start 167; Stop 191
gcgccatactaataccatacttaac

SEQ ID NO: 475496 - DNA, 25 bp, Artificial
  probe
  misc_feature (1)..(25): SEQ ID NO: 7710; WAN024BKP; Start 166; Stop 190
cgcgccatactaataccatacttaa

SEQ ID NO: 475497 - DNA, 25 bp, Artificial
  probe
  misc_feature (1)..(25): SEQ ID NO: 7710; WAN024BKP; Start 106; Stop 130
atcttagtcaataatcctactcttg

SEQ ID NO: 475498 - DNA, 25 bp, Artificial
  probe
  misc_feature (1)..(25): SEQ ID NO: 7710; WAN024BKP; Start 171; Stop 195
catactaataccatacttaactgca

SEQ ID NO: 475499 - DNA, 25 bp, Artificial
  probe
  misc_feature (1)..(25): SEQ ID NO: 7710; WAN024BKP; Start 12; Stop 36
tttatcatgtgcatcccaagctaca

SEQ ID NO: 475500 - DNA, 25 bp, Artificial
  probe
  misc_feature (1)..(25): SEQ ID NO: 7710; WAN024BKP; Start 80; Stop 104
cagctattcgtaaaatccatccaaa

SEQ ID NO: 475501 - DNA, 25 bp, Artificial
  probe
  misc_feature (1)..(25): SEQ ID NO: 7710; WAN024BKP; Start 79; Stop 103
acagctattcgtaaaatccatccaa

SEQ ID NO: 475502 - DNA, 25 bp, Artificial
  probe
  misc_feature (1)..(25): SEQ ID NO: 7710; WAN024BKP; Start 48; Stop 72
ggcaaaattaccatatacatcagct

SEQ ID NO: 475503 - DNA, 25 bp, Artificial
  probe
  misc_feature (1)..(25): SEQ ID NO: 7710; WAN024BKP; Start 81; Stop 105
agctattcgtaaaatccatccaaaa

SEQ ID NO: 475504 - DNA, 25 bp, Artificial
  probe
  misc_feature (1)..(25): SEQ ID NO: 7710; WAN024BKP; Start 47; Stop 71
tggcaaaattaccatatacatcagc

SEQ ID NO: 475505 - DNA, 25 bp, Artificial
  probe
  misc_feature (1)..(25): SEQ ID NO: 7710; WAN024BKP; Start 113; Stop 137
tcaataatcctactcttgctgccgc

SEQ ID NO: 475506 - DNA, 25 bp, Artificial
  probe
  misc_feature (1)..(25): SEQ ID NO: 7710; WAN024BKP; Start 78; Stop 102
cacagctattcgtaaaatccatcca

SEQ ID NO: 475507 - DNA, 25 bp, Artificial
  probe
  misc_feature (1)..(25): SEQ ID NO: 7710; WAN024BKP; Start 13; Stop 37
ttatcatgtgcatcccaagctacag

SEQ ID NO: 475508 - DNA, 25 bp, Artificial
  probe
  misc_feature (1)..(25): SEQ ID NO: 7710; WAN024BKP; Start 2; Stop 26
tgttagggattttatcatgtgcatc

SEQ ID NO: 475509 - DNA, 25 bp, Artificial
  probe
  misc_feature (1)..(25): SEQ ID NO: 7710; WAN024BKP; Start 10; Stop 34
attttatcatgtgcatcccaagcta

SEQ ID NO: 475510 - DNA, 25 bp, Artificial
  probe
  misc_feature (1)..(25): SEQ ID NO: 7710; WAN024BKP; Start 1; Stop 25
ttgttagggattttatcatgtgcat

SEQ ID NO: 475511 - DNA, 25 bp, Artificial
  probe
  misc_feature (1)..(25): SEQ ID NO: 7710; WAN024BKP; Start 11; Stop 35
ttttatcatgtgcatcccaagctac

SEQ ID NO: 475512 - DNA, 25 bp, Artificial
  probe
  misc_feature (1)..(25): SEQ ID NO: 7710; WAN024BKP; Start 77; Stop 101
gcacagctattcgtaaaatccatcc

SEQ ID NO: 475513 - DNA, 25 bp, Artificial
  probe
  misc_feature (1)..(25): SEQ ID NO: 7710; WAN024BKP; Start 45; Stop 69
gttggcaaaattaccatatacatca

SEQ ID NO: 475514 - DNA, 25 bp, Artificial
  probe
  misc_feature (1)..(25): SEQ ID NO: 7710; WAN024BKP; Start 44; Stop 68
tgttggcaaaattaccatatacatc

SEQ ID NO: 475515 - DNA, 25 bp, Artificial
  probe
  misc_feature (1)..(25): SEQ ID NO: 7710; WAN024BKP; Start 9; Stop 33
gattttatcatgtgcatcccaagct

SEQ ID NO: 475516 - DNA, 25 bp, Artificial
  probe
  misc_feature (1)..(25): SEQ ID NO: 7710; WAN024BKP; Start 46; Stop 70
ttggcaaaattaccatatacatcag

SEQ ID NO: 475517 - DNA, 25 bp, Artificial
  probe
  misc_feature (1)..(25): SEQ ID NO: 7710; WAN024BKP; Start 43; Stop 67
ttgttggcaaaattaccatatacat

SEQ ID NO: 475518 - DNA, 25 bp, Artificial
  probe
  misc_feature (1)..(25): SEQ ID NO: 7710; WAN024BKP; Start 42; Stop 66
attgttggcaaaattaccatataca

SEQ ID NO: 475519 - DNA, 25 bp, Artificial
  probe
  misc_feature (1)..(25): SEQ ID NO: 7711; WAN024F6R; Start 60; Stop 84
ttgccgtatatatgtgactgacttc

SEQ ID NO: 475520 - DNA, 25 bp, Artificial
  probe
  misc_feature (1)..(25): SEQ ID NO: 7711; WAN024F6R; Start 59; Stop 83
cttgccgtatatatgtgactgactt

SEQ ID NO: 475521 - DNA, 25 bp, Artificial
  probe
  misc_feature (1)..(25): SEQ ID NO: 7711; WAN024F6R; Start 63; Stop 87
ccgtatatatgtgactgacttcgtc

SEQ ID NO: 475522 - DNA, 25 bp, Artificial
  probe
  misc_feature (1)..(25): SEQ ID NO: 7711; WAN024F6R; Start 58; Stop 82
ccttgccgtatatatgtgactgact

SEQ ID NO: 475523 - DNA, 25 bp, Artificial
  probe
  misc_feature (1)..(25): SEQ ID NO: 7711; WAN024F6R; Start 62; Stop 86
gccgtatatatgtgactgacttcgt

SEQ ID NO: 475524 - DNA, 25 bp, Artificial
  probe
  misc_feature (1)..(25): SEQ ID NO: 7711; WAN024F6R; Start 61; Stop 85
tgccgtatatatgtgactgacttcg

SEQ ID NO: 475525 - DNA, 25 bp, Artificial
  probe
  misc_feature (1)..(25): SEQ ID NO: 7711; WAN024F6R; Start 57; Stop 81
gccttgccgtatatatgtgactgac

SEQ ID NO: 475526 - DNA, 25 bp, Artificial
  probe
  misc_feature (1)..(25): SEQ ID NO: 7711; WAN024F6R; Start 30; Stop 54
aaatcaaattcaaaccacgtcaacg

SEQ ID NO: 475527 - DNA, 25 bp, Artificial
  probe
  misc_feature (1)..(25): SEQ ID NO: 7711; WAN024F6R; Start 64; Stop 88
cgtatatatgtgactgacttcgtca

SEQ ID NO: 475528 - DNA, 25 bp, Artificial
  probe
  misc_feature (1)..(25): SEQ ID NO: 7711; WAN024F6R; Start 56; Stop 80
cgccttgccgtatatatgtgactga

SEQ ID NO: 475529 - DNA, 25 bp, Artificial
  probe
  misc_feature (1)..(25): SEQ ID NO: 7711; WAN024F6R; Start 55; Stop 79
tcgccttgccgtatatatgtgactg

SEQ ID NO: 475530 - DNA, 25 bp, Artificial
  probe
  misc_feature (1)..(25): SEQ ID NO: 7711; WAN024F6R; Start 29; Stop 53
aaaatcaaattcaaaccacgtcaac

SEQ ID NO: 475531 - DNA, 25 bp, Artificial
  probe
  misc_feature (1)..(25): SEQ ID NO: 7711; WAN024F6R; Start 54; Stop 78
gtcgccttgccgtatatatgtgact

SEQ ID NO: 475532 - DNA, 25 bp, Artificial
  probe
  misc_feature (1)..(25): SEQ ID NO: 7711; WAN024F6R; Start 28; Stop 52
gaaaatcaaattcaaaccacgtcaa

SEQ ID NO: 475533 - DNA, 25 bp, Artificial
  probe
  misc_feature (1)..(25): SEQ ID NO: 7711; WAN024F6R; Start 26; Stop 50
tcgaaaatcaaattcaaaccacgtc

SEQ ID NO: 475534 - DNA, 25 bp, Artificial
  probe
  misc_feature (1)..(25): SEQ ID NO: 7711; WAN024F6R; Start 27; Stop 51
cgaaaatcaaattcaaaccacgtca

SEQ ID NO: 475535 - DNA, 25 bp, Artificial
  probe
  misc_feature (1)..(25): SEQ ID NO: 7711; WAN024F6R; Start 31; Stop 55
aatcaaattcaaaccacgtcaacgt

SEQ ID NO: 475536 - DNA, 25 bp, Artificial
  probe
  misc_feature (1)..(25): SEQ ID NO: 7711; WAN024F6R; Start 32; Stop 56
atcaaattcaaaccacgtcaacgtc

SEQ ID NO: 475537 - DNA, 25 bp, Artificial
  probe
  misc_feature (1)..(25): SEQ ID NO: 7711; WAN024F6R; Start 24; Stop 48
cttcgaaaatcaaattcaaaccacg

SEQ ID NO: 475538 - DNA, 25 bp, Artificial
  probe
  misc_feature (1)..(25): SEQ ID NO: 7711; WAN024F6R; Start 25; Stop 49
ttcgaaaatcaaattcaaaccacgt

SEQ ID NO: 475539 - DNA, 25 bp, Artificial
  probe
  misc_feature (1)..(25): SEQ ID NO: 7711; WAN024F6R; Start 23; Stop 47
tcttcgaaaatcaaattcaaaccac

SEQ ID NO: 475540 - DNA, 25 bp, Artificial
  probe
  misc_feature (1)..(25): SEQ ID NO: 7711; WAN024F6R; Start 5; Stop 29
tatcagatgagtttatactcttcga

SEQ ID NO: 475541 - DNA, 25 bp, Artificial
  probe
  misc_feature (1)..(25): SEQ ID NO: 7711; WAN024F6R; Start 4; Stop 28
ttatcagatgagtttatactcttcg

SEQ ID NO: 475542 - DNA, 25 bp, Artificial
  probe
  misc_feature (1)..(25): SEQ ID NO: 7711; WAN024F6R; Start 7; Stop 31
tcagatgagtttatactcttcgaaa

SEQ ID NO: 475543 - DNA, 25 bp, Artificial
  probe
  misc_feature (1)..(25): SEQ ID NO: 7711; WAN024F6R; Start 33; Stop 57
tcaaattcaaaccacgtcaacgtcg

SEQ ID NO: 475544 - DNA, 25 bp, Artificial
  probe
  misc_feature (1)..(25): SEQ ID NO: 7711; WAN024F6R; Start 6; Stop 30
atcagatgagtttatactcttcgaa

SEQ ID NO: 475545 - DNA, 25 bp, Artificial
  probe
  misc_feature (1)..(25): SEQ ID NO: 7711; WAN024F6R; Start 2; Stop 26
tgttatcagatgagtttatactctt

SEQ ID NO: 475546 - DNA, 25 bp, Artificial
  probe
  misc_feature (1)..(25): SEQ ID NO: 7711; WAN024F6R; Start 1; Stop 25
ttgttatcagatgagtttatactct

SEQ ID NO: 475547 - DNA, 25 bp, Artificial
  probe
  misc_feature (1)..(25): SEQ ID NO: 7711; WAN024F6R; Start 8; Stop 32
cagatgagtttatactcttcgaaaa

SEQ ID NO: 475548 - DNA, 25 bp, Artificial
  probe
  misc_feature (1)..(25): SEQ ID NO: 7711; WAN024F6R; Start 14; Stop 38
agtttatactcttcgaaaatcaaat

SEQ ID NO: 475549 - DNA, 25 bp, Artificial
  probe
  misc_feature (1)..(25): SEQ ID NO: 7711; WAN024F6R; Start 12; Stop 36
tgagtttatactcttcgaaaatcaa

SEQ ID NO: 475550 - DNA, 25 bp, Artificial
  probe
  misc_feature (1)..(25): SEQ ID NO: 7711; WAN024F6R; Start 11; Stop 35
atgagtttatactcttcgaaaatca

SEQ ID NO: 475551 - DNA, 25 bp, Artificial
  probe
  misc_feature (1)..(25): SEQ ID NO: 7711; WAN024F6R; Start 9; Stop 33
agatgagtttatactcttcgaaaat

SEQ ID NO: 475552 - DNA, 25 bp, Artificial
  probe
  misc_feature (1)..(25): SEQ ID NO: 7712; WAN024F86; Start 90; Stop 114
tttgaggttactgataggattgtgg

SEQ ID NO: 475553 - DNA, 25 bp, Artificial
  probe
  misc_feature (1)..(25): SEQ ID NO: 7712; WAN024F86; Start 89; Stop 113
gtttgaggttactgataggattgtg

SEQ ID NO: 475554 - DNA, 25 bp, Artificial
  probe
  misc_feature (1)..(25): SEQ ID NO: 7712; WAN024F86; Start 140; Stop 164
gcgttcaatttctctctcgtttaat

SEQ ID NO: 475555 - DNA, 25 bp, Artificial
  probe
  misc_feature (1)..(25): SEQ ID NO: 7712; WAN024F86; Start 139; Stop 163
agcgttcaatttctctctcgtttaa

SEQ ID NO: 475556 - DNA, 25 bp, Artificial
  probe
  misc_feature (1)..(25): SEQ ID NO: 7712; WAN024F86; Start 138; Stop 162
aagcgttcaatttctctctcgttta

SEQ ID NO: 475557 - DNA, 25 bp, Artificial
  probe
  misc_feature (1)..(25): SEQ ID NO: 7712; WAN024F86; Start 181; Stop 205
atacggacggatgatctaaataacc

SEQ ID NO: 475558 - DNA, 25 bp, Artificial
  probe
  misc_feature (1)..(25): SEQ ID NO: 7712; WAN024F86; Start 88; Stop 112
agtttgaggttactgataggattgt

SEQ ID NO: 475559 - DNA, 25 bp, Artificial
  probe
  misc_feature (1)..(25): SEQ ID NO: 7712; WAN024F86; Start 97; Stop 121
ttactgataggattgtgggcgatag

SEQ ID NO: 475560 - DNA, 25 bp, Artificial
  probe
  misc_feature (1)..(25): SEQ ID NO: 7712; WAN024F86; Start 91; Stop 115
ttgaggttactgataggattgtggg

SEQ ID NO: 475561 - DNA, 25 bp, Artificial
  probe
  misc_feature (1)..(25): SEQ ID NO: 7712; WAN024F86; Start 188; Stop 212
cggatgatctaaataacccagttct

SEQ ID NO: 475562 - DNA, 25 bp, Artificial
  probe
  misc_feature (1)..(25): SEQ ID NO: 7712; WAN024F86; Start 187; Stop 211
acggatgatctaaataacccagttc

SEQ ID NO: 475563 - DNA, 25 bp, Artificial
  probe
  misc_feature (1)..(25): SEQ ID NO: 7712; WAN024F86; Start 186; Stop 210
gacggatgatctaaataacccagtt

SEQ ID NO: 475564 - DNA, 25 bp, Artificial
  probe
  misc_feature (1)..(25): SEQ ID NO: 7712; WAN024F86; Start 96; Stop 120
gttactgataggattgtgggcgata

SEQ ID NO: 475565 - DNA, 25 bp, Artificial
  probe
  misc_feature (1)..(25): SEQ ID NO: 7712; WAN024F86; Start 177; Stop 201
gcaaatacggacggatgatctaaat

SEQ ID NO: 475566 - DNA, 25 bp, Artificial
  probe
  misc_feature (1)..(25): SEQ ID NO: 7712; WAN024F86; Start 180; Stop 204
aatacggacggatgatctaaataac

SEQ ID NO: 475567 - DNA, 25 bp, Artificial
  probe
  misc_feature (1)..(25): SEQ ID NO: 7712; WAN024F86; Start 178; Stop 202
caaatacggacggatgatctaaata

SEQ ID NO: 475568 - DNA, 25 bp, Artificial
  probe
  misc_feature (1)..(25): SEQ ID NO: 7712; WAN024F86; Start 182; Stop 206
tacggacggatgatctaaataaccc

SEQ ID NO: 475569 - DNA, 25 bp, Artificial
  probe
  misc_feature (1)..(25): SEQ ID NO: 7712; WAN024F86; Start 137; Stop 161
caagcgttcaatttctctctcgttt

SEQ ID NO: 475570 - DNA, 25 bp, Artificial
  probe
  misc_feature (1)..(25): SEQ ID NO: 7712; WAN024F86; Start 185; Stop 209
ggacggatgatctaaataacccagt

SEQ ID NO: 475571 - DNA, 25 bp, Artificial
  probe
  misc_feature (1)..(25): SEQ ID NO: 7712; WAN024F86; Start 1; Stop 25
ttgttattggaagcaaccgagtcag

SEQ ID NO: 475572 - DNA, 25 bp, Artificial
  probe
  misc_feature (1)..(25): SEQ ID NO: 7712; WAN024F86; Start 189; Stop 213
ggatgatctaaataacccagttctt

SEQ ID NO: 475573 - DNA, 25 bp, Artificial
  probe
  misc_feature (1)..(25): SEQ ID NO: 7712; WAN024F86; Start 179; Stop 203
aaatacggacggatgatctaaataa

SEQ ID NO: 475574 - DNA, 25 bp, Artificial
  probe
  misc_feature (1)..(25): SEQ ID NO: 7712; WAN024F86; Start 141; Stop 165
cgttcaatttctctctcgtttaatt

SEQ ID NO: 475575 - DNA, 25 bp, Artificial
  probe
  misc_feature (1)..(25): SEQ ID NO: 7712; WAN024F86; Start 176; Stop 200
agcaaatacggacggatgatctaaa

SEQ ID NO: 475576 - DNA, 25 bp, Artificial
  probe
  misc_feature (1)..(25): SEQ ID NO: 7712; WAN024F86; Start 143; Stop 167
ttcaatttctctctcgtttaattcg

SEQ ID NO: 475577 - DNA, 25 bp, Artificial
  probe
  misc_feature (1)..(25): SEQ ID NO: 7712; WAN024F86; Start 3; Stop 27
gttattggaagcaaccgagtcagtc

SEQ ID NO: 475578 - DNA, 25 bp, Artificial
  probe
  misc_feature (1)..(25): SEQ ID NO: 7712; WAN024F86; Start 194; Stop 218
atctaaataacccagttcttcaaga

SEQ ID NO: 475579 - DNA, 25 bp, Artificial
  probe
  misc_feature (1)..(25): SEQ ID NO: 7712; WAN024F86; Start 192; Stop 216
tgatctaaataacccagttcttcaa

SEQ ID NO: 475580 - DNA, 25 bp, Artificial
  probe
  misc_feature (1)..(25): SEQ ID NO: 7712; WAN024F86; Start 175; Stop 199
gagcaaatacggacggatgatctaa

SEQ ID NO: 475581 - DNA, 25 bp, Artificial
  probe
  misc_feature (1)..(25): SEQ ID NO: 7712; WAN024F86; Start 191; Stop 215
atgatctaaataacccagttcttca

SEQ ID NO: 475582 - DNA, 25 bp, Artificial
  probe
  misc_feature (1)..(25): SEQ ID NO: 7712; WAN024F86; Start 193; Stop 217
gatctaaataacccagttcttcaag

SEQ ID NO: 475583 - DNA, 25 bp, Artificial
  probe
  misc_feature (1)..(25): SEQ ID NO: 7712; WAN024F86; Start 184; Stop 208
cggacggatgatctaaataacccag

SEQ ID NO: 475584 - DNA, 25 bp, Artificial
  probe
  misc_feature (1)..(25): SEQ ID NO: 7712; WAN024F86; Start 190; Stop 214
gatgatctaaataacccagttcttc

SEQ ID NO: 475585 - DNA, 25 bp, Artificial
  probe
  misc_feature (1)..(25): SEQ ID NO: 7713; WAN024CN9; Start 40; Stop 64
ccgtctcctgtagtattgattgatt

SEQ ID NO: 475586 - DNA, 25 bp, Artificial
  probe
  misc_feature (1)..(25): SEQ ID NO: 7713; WAN024CN9; Start 39; Stop 63
accgtctcctgtagtattgattgat

SEQ ID NO: 475587 - DNA, 25 bp, Artificial
  probe
  misc_feature (1)..(25): SEQ ID NO: 7713; WAN024CN9; Start 131; Stop 155
ctaagtataggttatctaaggctgc

SEQ ID NO: 475588 - DNA, 25 bp, Artificial
  probe
  misc_feature (1)..(25): SEQ ID NO: 7713; WAN024CN9; Start 38; Stop 62
caccgtctcctgtagtattgattga

SEQ ID NO: 475589 - DNA, 25 bp, Artificial
  probe
  misc_feature (1)..(25): SEQ ID NO: 7713; WAN024CN9; Start 183; Stop 207
agtagcttctgagttaagtgttaca

SEQ ID NO: 475590 - DNA, 25 bp, Artificial
  probe
  misc_feature (1)..(25): SEQ ID NO: 7713; WAN024CN9; Start 138; Stop 162
taggttatctaaggctgcatcattc

SEQ ID NO: 475591 - DNA, 25 bp, Artificial
  probe
  misc_feature (1)..(25): SEQ ID NO: 7713; WAN024CN9; Start 135; Stop 159
gtataggttatctaaggctgcatca

SEQ ID NO: 475592 - DNA, 25 bp, Artificial
  probe
  misc_feature (1)..(25): SEQ ID NO: 7713; WAN024CN9; Start 137; Stop 161
ataggttatctaaggctgcatcatt

SEQ ID NO: 475593 - DNA, 25 bp, Artificial
  probe
  misc_feature (1)..(25): SEQ ID NO: 7713; WAN024CN9; Start 134; Stop 158
agtataggttatctaaggctgcatc

SEQ ID NO: 475594 - DNA, 25 bp, Artificial
  probe
  misc_feature (1)..(25): SEQ ID NO: 7713; WAN024CN9; Start 37; Stop 61
acaccgtctcctgtagtattgattg

SEQ ID NO: 475595 - DNA, 25 bp, Artificial
  probe
  misc_feature (1)..(25): SEQ ID NO: 7713; WAN024CN9; Start 133; Stop 157
aagtataggttatctaaggctgcat

SEQ ID NO: 475596 - DNA, 25 bp, Artificial
  probe
  misc_feature (1)..(25): SEQ ID NO: 7713; WAN024CN9; Start 184; Stop 208
gtagcttctgagttaagtgttacat

SEQ ID NO: 475597 - DNA, 25 bp, Artificial
  probe
  misc_feature (1)..(25): SEQ ID NO: 7713; WAN024CN9; Start 136; Stop 160
tataggttatctaaggctgcatcat

SEQ ID NO: 475598 - DNA, 25 bp, Artificial
  probe
  misc_feature (1)..(25): SEQ ID NO: 7713; WAN024CN9; Start 41; Stop 65
cgtctcctgtagtattgattgattt

SEQ ID NO: 475599 - DNA, 25 bp, Artificial
  probe
  misc_feature (1)..(25): SEQ ID NO: 7713; WAN024CN9; Start 132; Stop 156
taagtataggttatctaaggctgca

SEQ ID NO: 475600 - DNA, 25 bp, Artificial
  probe
  misc_feature (1)..(25): SEQ ID NO: 7713; WAN024CN9; Start 36; Stop 60
tacaccgtctcctgtagtattgatt

SEQ ID NO: 475601 - DNA, 25 bp, Artificial
  probe
  misc_feature (1)..(25): SEQ ID NO: 7713; WAN024CN9; Start 51; Stop 75
agtattgattgatttatccatcgct

SEQ ID NO: 475602 - DNA, 25 bp, Artificial
  probe
  misc_feature (1)..(25): SEQ ID NO: 7713; WAN024CN9; Start 185; Stop 209
tagcttctgagttaagtgttacatt

SEQ ID NO: 475603 - DNA, 25 bp, Artificial
  probe
  misc_feature (1)..(25): SEQ ID NO: 7713; WAN024CN9; Start 130; Stop 154
tctaagtataggttatctaaggctg

SEQ ID NO: 475604 - DNA, 25 bp, Artificial
  probe
  misc_feature (1)..(25): SEQ ID NO: 7713; WAN024CN9; Start 182; Stop 206
tagtagcttctgagttaagtgttac

SEQ ID NO: 475605 - DNA, 25 bp, Artificial
  probe
  misc_feature (1)..(25): SEQ ID NO: 7713; WAN024CN9; Start 27; Stop 51
gtattcaactacaccgtctcctgta

SEQ ID NO: 475606 - DNA, 25 bp, Artificial
  probe
  misc_feature (1)..(25): SEQ ID NO: 7713; WAN024CN9; Start 181; Stop 205
ttagtagcttctgagttaagtgtta

SEQ ID NO: 475607 - DNA, 25 bp, Artificial
  probe
  misc_feature (1)..(25): SEQ ID NO: 7713; WAN024CN9; Start 139; Stop 163
aggttatctaaggctgcatcattcg

SEQ ID NO: 475608 - DNA, 25 bp, Artificial
  probe
  misc_feature (1)..(25): SEQ ID NO: 7713; WAN024CN9; Start 17; Stop 41
tctcacttacgtattcaactacacc

SEQ ID NO: 475609 - DNA, 25 bp, Artificial
  probe
  misc_feature (1)..(25): SEQ ID NO: 7713; WAN024CN9; Start 56; Stop 80
tgattgatttatccatcgctaatac

SEQ ID NO: 475610 - DNA, 25 bp, Artificial
  probe
  misc_feature (1)..(25): SEQ ID NO: 7713; WAN024CN9; Start 52; Stop 76
gtattgattgatttatccatcgcta

SEQ ID NO: 475611 - DNA, 25 bp, Artificial
  probe
  misc_feature (1)..(25): SEQ ID NO: 7713; WAN024CN9; Start 50; Stop 74
tagtattgattgatttatccatcgc

SEQ ID NO: 475612 - DNA, 25 bp, Artificial
  probe
  misc_feature (1)..(25): SEQ ID NO: 7713; WAN024CN9; Start 186; Stop 210
agcttctgagttaagtgttacattt

SEQ ID NO: 475613 - DNA, 25 bp, Artificial
  probe
  misc_feature (1)..(25): SEQ ID NO: 7713; WAN024CN9; Start 18; Stop 42
ctcacttacgtattcaactacaccg

SEQ ID NO: 475614 - DNA, 25 bp, Artificial
  probe
  misc_feature (1)..(25): SEQ ID NO: 7713; WAN024CN9; Start 16; Stop 40
ttctcacttacgtattcaactacac

SEQ ID NO: 475615 - DNA, 25 bp, Artificial
  probe
  misc_feature (1)..(25): SEQ ID NO: 7713; WAN024CN9; Start 54; Stop 78
attgattgatttatccatcgctaat

SEQ ID NO: 475616 - DNA, 25 bp, Artificial
  probe
  misc_feature (1)..(25): SEQ ID NO: 7713; WAN024CN9; Start 223; Stop 247
agtacgttattcgttatcgctgtat

SEQ ID NO: 475617 - DNA, 25 bp, Artificial
  probe
  misc_feature (1)..(25): SEQ ID NO: 7713; WAN024CN9; Start 220; Stop 244
cttagtacgttattcgttatcgctg

SEQ ID NO: 475618 - DNA, 25 bp, Artificial
  probe
  misc_feature (1)..(25): SEQ ID NO: 7714; WAN024CUW; Start 157; Stop 181
tttcaagccacctctaaatgtttaa

SEQ ID NO: 475619 - DNA, 25 bp, Artificial
  probe
  misc_feature (1)..(25): SEQ ID NO: 7714; WAN024CUW; Start 156; Stop 180
atttcaagccacctctaaatgttta

SEQ ID NO: 475620 - DNA, 25 bp, Artificial
  probe
  misc_feature (1)..(25): SEQ ID NO: 7714; WAN024CUW; Start 155; Stop 179
tatttcaagccacctctaaatgttt

SEQ ID NO: 475621 - DNA, 25 bp, Artificial
  probe
  misc_feature (1)..(25): SEQ ID NO: 7714; WAN024CUW; Start 154; Stop 178
ttatttcaagccacctctaaatgtt

SEQ ID NO: 475622 - DNA, 25 bp, Artificial
  probe
  misc_feature (1)..(25): SEQ ID NO: 7714; WAN024CUW; Start 153; Stop 177
tttatttcaagccacctctaaatgt

SEQ ID NO: 475623 - DNA, 25 bp, Artificial
  probe
  misc_feature (1)..(25): SEQ ID NO: 7714; WAN024CUW; Start 158; Stop 182
ttcaagccacctctaaatgtttaaa

SEQ ID NO: 475624 - DNA, 25 bp, Artificial
  probe
  misc_feature (1)..(25): SEQ ID NO: 7714; WAN024CUW; Start 110; Stop 134
atccagatcttgaattgtcatcgaa

SEQ ID NO: 475625 - DNA, 25 bp, Artificial
  probe
  misc_feature (1)..(25): SEQ ID NO: 7714; WAN024CUW; Start 109; Stop 133
catccagatcttgaattgtcatcga

SEQ ID NO: 475626 - DNA, 25 bp, Artificial
  probe
  misc_feature (1)..(25): SEQ ID NO: 7714; WAN024CUW; Start 108; Stop 132
tcatccagatcttgaattgtcatcg

SEQ ID NO: 475627 - DNA, 25 bp, Artificial
  probe
  misc_feature (1)..(25): SEQ ID NO: 7714; WAN024CUW; Start 128; Stop 152
catcgaaacgtcttgaattagcttt

SEQ ID NO: 475628 - DNA, 25 bp, Artificial
  probe
  misc_feature (1)..(25): SEQ ID NO: 7714; WAN024CUW; Start 124; Stop 148
ttgtcatcgaaacgtcttgaattag

SEQ ID NO: 475629 - DNA, 25 bp, Artificial
  probe
  misc_feature (1)..(25): SEQ ID NO: 7714; WAN024CUW; Start 121; Stop 145
gaattgtcatcgaaacgtcttgaat

SEQ ID NO: 475630 - DNA, 25 bp, Artificial
  probe
  misc_feature (1)..(25): SEQ ID NO: 7714; WAN024CUW; Start 123; Stop 147
attgtcatcgaaacgtcttgaatta

SEQ ID NO: 475631 - DNA, 25 bp, Artificial
  probe
  misc_feature (1)..(25): SEQ ID NO: 7714; WAN024CUW; Start 115; Stop 139
gatcttgaattgtcatcgaaacgtc

SEQ ID NO: 475632 - DNA, 25 bp, Artificial
  probe
  misc_feature (1)..(25): SEQ ID NO: 7714; WAN024CUW; Start 122; Stop 146
aattgtcatcgaaacgtcttgaatt

SEQ ID NO: 475633 - DNA, 25 bp, Artificial
  probe
  misc_feature (1)..(25): SEQ ID NO: 7714; WAN024CUW; Start 127; Stop 151
tcatcgaaacgtcttgaattagctt

SEQ ID NO: 475634 - DNA, 25 bp, Artificial
  probe
  misc_feature (1)..(25): SEQ ID NO: 7714; WAN024CUW; Start 116; Stop 140
atcttgaattgtcatcgaaacgtct

SEQ ID NO: 475635 - DNA, 25 bp, Artificial
  probe
  misc_feature (1)..(25): SEQ ID NO: 7714; WAN024CUW; Start 118; Stop 142
cttgaattgtcatcgaaacgtcttg

SEQ ID NO: 475636 - DNA, 25 bp, Artificial
  probe
  misc_feature (1)..(25): SEQ ID NO: 7714; WAN024CUW; Start 117; Stop 141
tcttgaattgtcatcgaaacgtctt

SEQ ID NO: 475637 - DNA, 25 bp, Artificial
  probe
  misc_feature (1)..(25): SEQ ID NO: 7714; WAN024CUW; Start 120; Stop 144
tgaattgtcatcgaaacgtcttgaa

SEQ ID NO: 475638 - DNA, 25 bp, Artificial
  probe
  misc_feature (1)..(25): SEQ ID NO: 7714; WAN024CUW; Start 119; Stop 143
ttgaattgtcatcgaaacgtcttga

SEQ ID NO: 475639 - DNA, 25 bp, Artificial
  probe
  misc_feature (1)..(25): SEQ ID NO: 7714; WAN024CUW; Start 126; Stop 150
gtcatcgaaacgtcttgaattagct

SEQ ID NO: 475640 - DNA, 25 bp, Artificial
  probe
  misc_feature (1)..(25): SEQ ID NO: 7714; WAN024CUW; Start 125; Stop 149
tgtcatcgaaacgtcttgaattagc

SEQ ID NO: 475641 - DNA, 25 bp, Artificial
  probe
  misc_feature (1)..(25): SEQ ID NO: 7714; WAN024CUW; Start 54; Stop 78
tttgtcttgttgtaactttgataag

SEQ ID NO: 475642 - DNA, 25 bp, Artificial
  probe
  misc_feature (1)..(25): SEQ ID NO: 7714; WAN024CUW; Start 112; Stop 136
ccagatcttgaattgtcatcgaaac

SEQ ID NO: 475643 - DNA, 25 bp, Artificial
  probe
  misc_feature (1)..(25): SEQ ID NO: 7714; WAN024CUW; Start 111; Stop 135
tccagatcttgaattgtcatcgaaa

SEQ ID NO: 475644 - DNA, 25 bp, Artificial
  probe
  misc_feature (1)..(25): SEQ ID NO: 7714; WAN024CUW; Start 113; Stop 137
cagatcttgaattgtcatcgaaacg

SEQ ID NO: 475645 - DNA, 25 bp, Artificial
  probe
  misc_feature (1)..(25): SEQ ID NO: 7714; WAN024CUW; Start 114; Stop 138
agatcttgaattgtcatcgaaacgt

SEQ ID NO: 475646 - DNA, 25 bp, Artificial
  probe
  misc_feature (1)..(25): SEQ ID NO: 7714; WAN024CUW; Start 107; Stop 131
ttcatccagatcttgaattgtcatc

SEQ ID NO: 475647 - DNA, 25 bp, Artificial
  probe
  misc_feature (1)..(25): SEQ ID NO: 7714; WAN024CUW; Start 159; Stop 183
tcaagccacctctaaatgtttaaaa

SEQ ID NO: 475648 - DNA, 25 bp, Artificial
  probe
  misc_feature (1)..(25): SEQ ID NO: 7714; WAN024CUW; Start 152; Stop 176
ttttatttcaagccacctctaaatg

SEQ ID NO: 475649 - DNA, 25 bp, Artificial
  probe
  misc_feature (1)..(25): SEQ ID NO: 7714; WAN024CUW; Start 55; Stop 79
ttgtcttgttgtaactttgataagt

SEQ ID NO: 475650 - DNA, 25 bp, Artificial
  probe
  misc_feature (1)..(25): SEQ ID NO: 7714; WAN024CUW; Start 208; Stop 232
accattcaggaagttttaatgacta

SEQ ID NO: 475651 - DNA, 25 bp, Artificial
  probe
  misc_feature (1)..(25): SEQ ID NO: 7715; WAN024F5G; Start 3; Stop 27
gttccttgatggtagtggcatattc

SEQ ID NO: 475652 - DNA, 25 bp, Artificial
  probe
  misc_feature (1)..(25): SEQ ID NO: 7715; WAN024F5G; Start 2; Stop 26
tgttccttgatggtagtggcatatt

SEQ ID NO: 475653 - DNA, 25 bp, Artificial
  probe
  misc_feature (1)..(25): SEQ ID NO: 7715; WAN024F5G; Start 1; Stop 25
ttgttccttgatggtagtggcatat

SEQ ID NO: 475654 - DNA, 25 bp, Artificial
  probe
  misc_feature (1)..(25): SEQ ID NO: 7715; WAN024F5G; Start 8; Stop 32
ttgatggtagtggcatattcgtctt

SEQ ID NO: 475655 - DNA, 25 bp, Artificial
  probe
  misc_feature (1)..(25): SEQ ID NO: 7715; WAN024F5G; Start 7; Stop 31
cttgatggtagtggcatattcgtct

SEQ ID NO: 475656 - DNA, 25 bp, Artificial
  probe
  misc_feature (1)..(25): SEQ ID NO: 7715; WAN024F5G; Start 4; Stop 28
ttccttgatggtagtggcatattcg

SEQ ID NO: 475657 - DNA, 25 bp, Artificial
  probe
  misc_feature (1)..(25): SEQ ID NO: 7715; WAN024F5G; Start 6; Stop 30
ccttgatggtagtggcatattcgtc

SEQ ID NO: 475658 - DNA, 25 bp, Artificial
  probe
  misc_feature (1)..(25): SEQ ID NO: 7715; WAN024F5G; Start 10; Stop 34
gatggtagtggcatattcgtctttc

SEQ ID NO: 475659 - DNA, 25 bp, Artificial
  probe
  misc_feature (1)..(25): SEQ ID NO: 7715; WAN024F5G; Start 9; Stop 33
tgatggtagtggcatattcgtcttt

SEQ ID NO: 475660 - DNA, 25 bp, Artificial
  probe
  misc_feature (1)..(25): SEQ ID NO: 7715; WAN024F5G; Start 5; Stop 29
tccttgatggtagtggcatattcgt

SEQ ID NO: 475661 - DNA, 25 bp, Artificial
  probe
  misc_feature (1)..(25): SEQ ID NO: 7715; WAN024F5G; Start 15; Stop 39
tagtggcatattcgtctttccattc

SEQ ID NO: 475662 - DNA, 25 bp, Artificial
  probe
  misc_feature (1)..(25): SEQ ID NO: 7715; WAN024F5G; Start 11; Stop 35
atggtagtggcatattcgtctttcc

SEQ ID NO: 475663 - DNA, 25 bp, Artificial
  probe
  misc_feature (1)..(25): SEQ ID NO: 7715; WAN024F5G; Start 14; Stop 38
gtagtggcatattcgtctttccatt

SEQ ID NO: 475664 - DNA, 25 bp, Artificial
  probe
  misc_feature (1)..(25): SEQ ID NO: 7715; WAN024F5G; Start 20; Stop 44
gcatattcgtctttccattcccaga

SEQ ID NO: 475665 - DNA, 25 bp, Artificial
  probe
  misc_feature (1)..(25): SEQ ID NO: 7715; WAN024F5G; Start 13; Stop 37
ggtagtggcatattcgtctttccat

SEQ ID NO: 475666 - DNA, 25 bp, Artificial
  probe
  misc_feature (1)..(25): SEQ ID NO: 7715; WAN024F5G; Start 19; Stop 43
ggcatattcgtctttccattcccag

SEQ ID NO: 475667 - DNA, 25 bp, Artificial
  probe
  misc_feature (1)..(25): SEQ ID NO: 7715; WAN024F5G; Start 31; Stop 55
tttccattcccagactttcgtcaag

SEQ ID NO: 475668 - DNA, 25 bp, Artificial
  probe
  misc_feature (1)..(25): SEQ ID NO: 7715; WAN024F5G; Start 30; Stop 54
ctttccattcccagactttcgtcaa

SEQ ID NO: 475669 - DNA, 25 bp, Artificial
  probe
  misc_feature (1)..(25): SEQ ID NO: 7715; WAN024F5G; Start 16; Stop 40
agtggcatattcgtctttccattcc

SEQ ID NO: 475670 - DNA, 25 bp, Artificial
  probe
  misc_feature (1)..(25): SEQ ID NO: 7715; WAN024F5G; Start 55; Stop 79
gaaagactcacgaccaaggtcatag

SEQ ID NO: 475671 - DNA, 25 bp, Artificial
  probe
  misc_feature (1)..(25): SEQ ID NO: 7715; WAN024F5G; Start 33; Stop 57
tccattcccagactttcgtcaagaa

SEQ ID NO: 475672 - DNA, 25 bp, Artificial
  probe
  misc_feature (1)..(25): SEQ ID NO: 7715; WAN024F5G; Start 32; Stop 56
ttccattcccagactttcgtcaaga

SEQ ID NO: 475673 - DNA, 25 bp, Artificial
  probe
  misc_feature (1)..(25): SEQ ID NO: 7715; WAN024F5G; Start 29; Stop 53
tctttccattcccagactttcgtca

SEQ ID NO: 475674 - DNA, 25 bp, Artificial
  probe
  misc_feature (1)..(25): SEQ ID NO: 7715; WAN024F5G; Start 54; Stop 78
agaaagactcacgaccaaggtcata

SEQ ID NO: 475675 - DNA, 25 bp, Artificial
  probe
  misc_feature (1)..(25): SEQ ID NO: 7715; WAN024F5G; Start 34; Stop 58
ccattcccagactttcgtcaagaaa

SEQ ID NO: 475676 - DNA, 25 bp, Artificial
  probe
  misc_feature (1)..(25): SEQ ID NO: 7715; WAN024F5G; Start 185; Stop 209
ttttgacggatgataatatcttgca

SEQ ID NO: 475677 - DNA, 25 bp, Artificial
  probe
  misc_feature (1)..(25): SEQ ID NO: 7715; WAN024F5G; Start 12; Stop 36
tggtagtggcatattcgtctttcca

SEQ ID NO: 475678 - DNA, 25 bp, Artificial
  probe
  misc_feature (1)..(25): SEQ ID NO: 7715; WAN024F5G; Start 22; Stop 46
atattcgtctttccattcccagact

SEQ ID NO: 475679 - DNA, 25 bp, Artificial
  probe
  misc_feature (1)..(25): SEQ ID NO: 7715; WAN024F5G; Start 21; Stop 45
catattcgtctttccattcccagac

SEQ ID NO: 475680 - DNA, 25 bp, Artificial
  probe
  misc_feature (1)..(25): SEQ ID NO: 7715; WAN024F5G; Start 221; Stop 245
caagcgtgaccaaggtgaagtttac

SEQ ID NO: 475681 - DNA, 25 bp, Artificial
  probe
  misc_feature (1)..(25): SEQ ID NO: 7715; WAN024F5G; Start 23; Stop 47
tattcgtctttccattcccagactt

SEQ ID NO: 475682 - DNA, 25 bp, Artificial
  probe
  misc_feature (1)..(25): SEQ ID NO: 7715; WAN024F5G; Start 17; Stop 41
gtggcatattcgtctttccattccc

SEQ ID NO: 475683 - DNA, 25 bp, Artificial
  probe
  misc_feature (1)..(25): SEQ ID NO: 7715; WAN024F5G; Start 189; Stop 213
gacggatgataatatcttgcaaagt

SEQ ID NO: 475684 - DNA, 25 bp, Artificial
  probe
  misc_feature (1)..(25): SEQ ID NO: 7716; WAN024CU7; Start 68; Stop 92
cgcatggttacaaattcttcagatg

SEQ ID NO: 475685 - DNA, 25 bp, Artificial
  probe
  misc_feature (1)..(25): SEQ ID NO: 7716; WAN024CU7; Start 67; Stop 91
acgcatggttacaaattcttcagat

SEQ ID NO: 475686 - DNA, 25 bp, Artificial
  probe
  misc_feature (1)..(25): SEQ ID NO: 7716; WAN024CU7; Start 66; Stop 90
aacgcatggttacaaattcttcaga

SEQ ID NO: 475687 - DNA, 25 bp, Artificial
  probe
  misc_feature (1)..(25): SEQ ID NO: 7716; WAN024CU7; Start 73; Stop 97
ggttacaaattcttcagatgcagtt

SEQ ID NO: 475688 - DNA, 25 bp, Artificial
  probe
  misc_feature (1)..(25): SEQ ID NO: 7716; WAN024CU7; Start 71; Stop 95
atggttacaaattcttcagatgcag

SEQ ID NO: 475689 - DNA, 25 bp, Artificial
  probe
  misc_feature (1)..(25): SEQ ID NO: 7716; WAN024CU7; Start 65; Stop 89
taacgcatggttacaaattcttcag

SEQ ID NO: 475690 - DNA, 25 bp, Artificial
  probe
  misc_feature (1)..(25): SEQ ID NO: 7716; WAN024CU7; Start 64; Stop 88
ttaacgcatggttacaaattcttca

SEQ ID NO: 475691 - DNA, 25 bp, Artificial
  probe
  misc_feature (1)..(25): SEQ ID NO: 7716; WAN024CU7; Start 70; Stop 94
catggttacaaattcttcagatgca

SEQ ID NO: 475692 - DNA, 25 bp, Artificial
  probe
  misc_feature (1)..(25): SEQ ID NO: 7716; WAN024CU7; Start 61; Stop 85
cgattaacgcatggttacaaattct

SEQ ID NO: 475693 - DNA, 25 bp, Artificial
  probe
  misc_feature (1)..(25): SEQ ID NO: 7716; WAN024CU7; Start 72; Stop 96
tggttacaaattcttcagatgcagt

SEQ ID NO: 475694 - DNA, 25 bp, Artificial
  probe
  misc_feature (1)..(25): SEQ ID NO: 7716; WAN024CU7; Start 25; Stop 49
aagaagcagacatatttatatcagc

SEQ ID NO: 475695 - DNA, 25 bp, Artificial
  probe
  misc_feature (1)..(25): SEQ ID NO: 7716; WAN024CU7; Start 75; Stop 99
ttacaaattcttcagatgcagttgg

SEQ ID NO: 475696 - DNA, 25 bp, Artificial
  probe
  misc_feature (1)..(25): SEQ ID NO: 7716; WAN024CU7; Start 74; Stop 98
gttacaaattcttcagatgcagttg

SEQ ID NO: 475697 - DNA, 25 bp, Artificial
  probe
  misc_feature (1)..(25): SEQ ID NO: 7716; WAN024CU7; Start 63; Stop 87
attaacgcatggttacaaattcttc

SEQ ID NO: 475698 - DNA, 25 bp, Artificial
  probe
  misc_feature (1)..(25): SEQ ID NO: 7716; WAN024CU7; Start 62; Stop 86
gattaacgcatggttacaaattctt

SEQ ID NO: 475699 - DNA, 25 bp, Artificial
  probe
  misc_feature (1)..(25): SEQ ID NO: 7716; WAN024CU7; Start 59; Stop 83
ttcgattaacgcatggttacaaatt

SEQ ID NO: 475700 - DNA, 25 bp, Artificial
  probe
  misc_feature (1)..(25): SEQ ID NO: 7716; WAN024CU7; Start 58; Stop 82
tttcgattaacgcatggttacaaat

SEQ ID NO: 475701 - DNA, 25 bp, Artificial
  probe
  misc_feature (1)..(25): SEQ ID NO: 7716; WAN024CU7; Start 76; Stop 100
tacaaattcttcagatgcagttggg

SEQ ID NO: 475702 - DNA, 25 bp, Artificial
  probe
  misc_feature (1)..(25): SEQ ID NO: 7716; WAN024CU7; Start 60; Stop 84
tcgattaacgcatggttacaaattc

SEQ ID NO: 475703 - DNA, 25 bp, Artificial
  probe
  misc_feature (1)..(25): SEQ ID NO: 7716; WAN024CU7; Start 57; Stop 81
gtttcgattaacgcatggttacaaa

SEQ ID NO: 475704 - DNA, 25 bp, Artificial
  probe
  misc_feature (1)..(25): SEQ ID NO: 7716; WAN024CU7; Start 54; Stop 78
tttgtttcgattaacgcatggttac

SEQ ID NO: 475705 - DNA, 25 bp, Artificial
  probe
  misc_feature (1)..(25): SEQ ID NO: 7716; WAN024CU7; Start 160; Stop 184
aaatccctgaatcatttcatcaacg

SEQ ID NO: 475706 - DNA, 25 bp, Artificial
  probe
  misc_feature (1)..(25): SEQ ID NO: 7716; WAN024CU7; Start 158; Stop 182
gcaaatccctgaatcatttcatcaa

SEQ ID NO: 475707 - DNA, 25 bp, Artificial
  probe
  misc_feature (1)..(25): SEQ ID NO: 7716; WAN024CU7; Start 153; Stop 177
caacggcaaatccctgaatcatttc

SEQ ID NO: 475708 - DNA, 25 bp, Artificial
  probe
  misc_feature (1)..(25): SEQ ID NO: 7716; WAN024CU7; Start 159; Stop 183
caaatccctgaatcatttcatcaac

SEQ ID NO: 475709 - DNA, 25 bp, Artificial
  probe
  misc_feature (1)..(25): SEQ ID NO: 7716; WAN024CU7; Start 188; Stop 212
tagccaattccatgaagtccgacaa

SEQ ID NO: 475710 - DNA, 25 bp, Artificial
  probe
  misc_feature (1)..(25): SEQ ID NO: 7716; WAN024CU7; Start 56; Stop 80
tgtttcgattaacgcatggttacaa

SEQ ID NO: 475711 - DNA, 25 bp, Artificial
  probe
  misc_feature (1)..(25): SEQ ID NO: 7716; WAN024CU7; Start 55; Stop 79
ttgtttcgattaacgcatggttaca

SEQ ID NO: 475712 - DNA, 25 bp, Artificial
  probe
  misc_feature (1)..(25): SEQ ID NO: 7716; WAN024CU7; Start 30; Stop 54
gcagacatatttatatcagcttctt

SEQ ID NO: 475713 - DNA, 25 bp, Artificial
  probe
  misc_feature (1)..(25): SEQ ID NO: 7716; WAN024CU7; Start 157; Stop 181
ggcaaatccctgaatcatttcatca

SEQ ID NO: 475714 - DNA, 25 bp, Artificial
  probe
  misc_feature (1)..(25): SEQ ID NO: 7716; WAN024CU7; Start 78; Stop 102
caaattcttcagatgcagttgggtg

SEQ ID NO: 475715 - DNA, 25 bp, Artificial
  probe
  misc_feature (1)..(25): SEQ ID NO: 7716; WAN024CU7; Start 161; Stop 185
aatccctgaatcatttcatcaacgc

SEQ ID NO: 475716 - DNA, 25 bp, Artificial
  probe
  misc_feature (1)..(25): SEQ ID NO: 7716; WAN024CU7; Start 79; Stop 103
aaattcttcagatgcagttgggtga

SEQ ID NO: 475717 - DNA, 25 bp, Artificial
  probe
  misc_feature (1)..(25): SEQ ID NO: 7717; WAN024BTL; Start 239; Stop 263
ttaccaaattagaacgggaaacaaa

SEQ ID NO: 475718 - DNA, 25 bp, Artificial
  probe
  misc_feature (1)..(25): SEQ ID NO: 7717; WAN024BTL; Start 5; Stop 29
tggataaattcaactgctcaatggt

SEQ ID NO: 475719 - DNA, 25 bp, Artificial
  probe
  misc_feature (1)..(25): SEQ ID NO: 7717; WAN024BTL; Start 238; Stop 262
gttaccaaattagaacgggaaacaa

SEQ ID NO: 475720 - DNA, 25 bp, Artificial
  probe
  misc_feature (1)..(25): SEQ ID NO: 7717; WAN024BTL; Start 236; Stop 260
atgttaccaaattagaacgggaaac

SEQ ID NO: 475721 - DNA, 25 bp, Artificial
  probe
  misc_feature (1)..(25): SEQ ID NO: 7717; WAN024BTL; Start 6; Stop 30
ggataaattcaactgctcaatggtt

SEQ ID NO: 475722 - DNA, 25 bp, Artificial
  probe
  misc_feature (1)..(25): SEQ ID NO: 7717; WAN024BTL; Start 4; Stop 28
ttggataaattcaactgctcaatgg

SEQ ID NO: 475723 - DNA, 25 bp, Artificial
  probe
  misc_feature (1)..(25): SEQ ID NO: 7717; WAN024BTL; Start 87; Stop 111
gaacctgacttcaactatcaaactg

SEQ ID NO: 475724 - DNA, 25 bp, Artificial
  probe
  misc_feature (1)..(25): SEQ ID NO: 7717; WAN024BTL; Start 235; Stop 259
aatgttaccaaattagaacgggaaa

SEQ ID NO: 475725 - DNA, 25 bp, Artificial
  probe
  misc_feature (1)..(25): SEQ ID NO: 7717; WAN024BTL; Start 234; Stop 258
aaatgttaccaaattagaacgggaa

SEQ ID NO: 475726 - DNA, 25 bp, Artificial
  probe
  misc_feature (1)..(25): SEQ ID NO: 7717; WAN024BTL; Start 88; Stop 112
aacctgacttcaactatcaaactgg

SEQ ID NO: 475727 - DNA, 25 bp, Artificial
  probe
  misc_feature (1)..(25): SEQ ID NO: 7717; WAN024BTL; Start 90; Stop 114
cctgacttcaactatcaaactggag

SEQ ID NO: 475728 - DNA, 25 bp, Artificial
  probe
  misc_feature (1)..(25): SEQ ID NO: 7717; WAN024BTL; Start 7; Stop 31
gataaattcaactgctcaatggttt

SEQ ID NO: 475729 - DNA, 25 bp, Artificial
  probe
  misc_feature (1)..(25): SEQ ID NO: 7717; WAN024BTL; Start 168; Stop 192
tgattacgaatataaggttaggaga

SEQ ID NO: 475730 - DNA, 25 bp, Artificial
  probe
  misc_feature (1)..(25): SEQ ID NO: 7717; WAN024BTL; Start 91; Stop 115
ctgacttcaactatcaaactggagc

SEQ ID NO: 475731 - DNA, 25 bp, Artificial
  probe
  misc_feature (1)..(25): SEQ ID NO: 7717; WAN024BTL; Start 89; Stop 113
acctgacttcaactatcaaactgga

SEQ ID NO: 475732 - DNA, 25 bp, Artificial
  probe
  misc_feature (1)..(25): SEQ ID NO: 7717; WAN024BTL; Start 83; Stop 107
agatgaacctgacttcaactatcaa

SEQ ID NO: 475733 - DNA, 25 bp, Artificial
  probe
  misc_feature (1)..(25): SEQ ID NO: 7717; WAN024BTL; Start 82; Stop 106
aagatgaacctgacttcaactatca

SEQ ID NO: 475734 - DNA, 25 bp, Artificial
  probe
  misc_feature (1)..(25): SEQ ID NO: 7717; WAN024BTL; Start 80; Stop 104
ccaagatgaacctgacttcaactat

SEQ ID NO: 475735 - DNA, 25 bp, Artificial
  probe
  misc_feature (1)..(25): SEQ ID NO: 7717; WAN024BTL; Start 81; Stop 105
caagatgaacctgacttcaactatc

SEQ ID NO: 475736 - DNA, 25 bp, Artificial
  probe
  misc_feature (1)..(25): SEQ ID NO: 7717; WAN024BTL; Start 173; Stop 197
acgaatataaggttaggagattaga

SEQ ID NO: 475737 - DNA, 25 bp, Artificial
  probe
  misc_feature (1)..(25): SEQ ID NO: 7717; WAN024BTL; Start 92; Stop 116
tgacttcaactatcaaactggagca

SEQ ID NO: 475738 - DNA, 25 bp, Artificial
  probe
  misc_feature (1)..(25): SEQ ID NO: 7717; WAN024BTL; Start 93; Stop 117
gacttcaactatcaaactggagcag

SEQ ID NO: 475739 - DNA, 25 bp, Artificial
  probe
  misc_feature (1)..(25): SEQ ID NO: 7717; WAN024BTL; Start 115; Stop 139
caggtggagaaagaaatcgaagaaa

SEQ ID NO: 475740 - DNA, 25 bp, Artificial
  probe
  misc_feature (1)..(25): SEQ ID NO: 7717; WAN024BTL; Start 152; Stop 176
tgactaaatggatagatgattacga

SEQ ID NO: 475741 - DNA, 25 bp, Artificial
  probe
  misc_feature (1)..(25): SEQ ID NO: 7717; WAN024BTL; Start 174; Stop 198
cgaatataaggttaggagattagag

SEQ ID NO: 475742 - DNA, 25 bp, Artificial
  probe
  misc_feature (1)..(25): SEQ ID NO: 7717; WAN024BTL; Start 167; Stop 191
atgattacgaatataaggttaggag

SEQ ID NO: 475743 - DNA, 25 bp, Artificial
  probe
  misc_feature (1)..(25): SEQ ID NO: 7717; WAN024BTL; Start 166; Stop 190
gatgattacgaatataaggttagga

SEQ ID NO: 475744 - DNA, 25 bp, Artificial
  probe
  misc_feature (1)..(25): SEQ ID NO: 7717; WAN024BTL; Start 165; Stop 189
agatgattacgaatataaggttagg

SEQ ID NO: 475745 - DNA, 25 bp, Artificial
  probe
  misc_feature (1)..(25): SEQ ID NO: 7717; WAN024BTL; Start 18; Stop 42
ctgctcaatggttttatcttatcgt

SEQ ID NO: 475746 - DNA, 25 bp, Artificial
  probe
  misc_feature (1)..(25): SEQ ID NO: 7717; WAN024BTL; Start 17; Stop 41
actgctcaatggttttatcttatcg

SEQ ID NO: 475747 - DNA, 25 bp, Artificial
  probe
  misc_feature (1)..(25): SEQ ID NO: 7717; WAN024BTL; Start 95; Stop 119
cttcaactatcaaactggagcaggt

SEQ ID NO: 475748 - DNA, 25 bp, Artificial
  probe
  misc_feature (1)..(25): SEQ ID NO: 7717; WAN024BTL; Start 94; Stop 118
acttcaactatcaaactggagcagg

SEQ ID NO: 475749 - DNA, 25 bp, Artificial
  probe
  misc_feature (1)..(25): SEQ ID NO: 7717; WAN024BTL; Start 241; Stop 265
accaaattagaacgggaaacaaaat

SEQ ID NO: 475750 - DNA, 25 bp, Artificial
  probe
  misc_feature (1)..(25): SEQ ID NO: 7718; WAN024BVE; Start 1; Stop 25
ttgttggctagtactaagaagttag

SEQ ID NO: 475751 - DNA, 25 bp, Artificial
  probe
  misc_feature (1)..(25): SEQ ID NO: 7718; WAN024BVE; Start 2; Stop 26
tgttggctagtactaagaagttagt

SEQ ID NO: 475752 - DNA, 25 bp, Artificial
  probe
  misc_feature (1)..(25): SEQ ID NO: 7718; WAN024BVE; Start 3; Stop 27
gttggctagtactaagaagttagtt

SEQ ID NO: 475753 - DNA, 25 bp, Artificial
  probe
  misc_feature (1)..(25): SEQ ID NO: 7718; WAN024BVE; Start 6; Stop 30
ggctagtactaagaagttagttagt

SEQ ID NO: 475754 - DNA, 25 bp, Artificial
  probe
  misc_feature (1)..(25): SEQ ID NO: 7718; WAN024BVE; Start 5; Stop 29
tggctagtactaagaagttagttag

SEQ ID NO: 475755 - DNA, 25 bp, Artificial
  probe
  misc_feature (1)..(25): SEQ ID NO: 7718; WAN024BVE; Start 4; Stop 28
ttggctagtactaagaagttagtta

SEQ ID NO: 475756 - DNA, 25 bp, Artificial
  probe
  misc_feature (1)..(25): SEQ ID NO: 7718; WAN024BVE; Start 94; Stop 118
caaatcctttggcgctctaagcttt

SEQ ID NO: 475757 - DNA, 25 bp, Artificial
  probe
  misc_feature (1)..(25): SEQ ID NO: 7718; WAN024BVE; Start 95; Stop 119
aaatcctttggcgctctaagctttt

SEQ ID NO: 475758 - DNA, 25 bp, Artificial
  probe
  misc_feature (1)..(25): SEQ ID NO: 7718; WAN024BVE; Start 93; Stop 117
tcaaatcctttggcgctctaagctt

SEQ ID NO: 475759 - DNA, 25 bp, Artificial
  probe
  misc_feature (1)..(25): SEQ ID NO: 7718; WAN024BVE; Start 96; Stop 120
aatcctttggcgctctaagcttttc

SEQ ID NO: 475760 - DNA, 25 bp, Artificial
  probe
  misc_feature (1)..(25): SEQ ID NO: 7719; WAN024CTC; Start 69; Stop 93
ttcttcctcctacttatctattcgt

SEQ ID NO: 475761 - DNA, 25 bp, Artificial
  probe
  misc_feature (1)..(25): SEQ ID NO: 7719; WAN024CTC; Start 70; Stop 94
tcttcctcctacttatctattcgta

SEQ ID NO: 475762 - DNA, 25 bp, Artificial
  probe
  misc_feature (1)..(25): SEQ ID NO: 7719; WAN024CTC; Start 68; Stop 92
tttcttcctcctacttatctattcg

SEQ ID NO: 475763 - DNA, 25 bp, Artificial
  probe
  misc_feature (1)..(25): SEQ ID NO: 7719; WAN024CTC; Start 11; Stop 35
tgtgcaattctggtgtagacgttaa

SEQ ID NO: 475764 - DNA, 25 bp, Artificial
  probe
  misc_feature (1)..(25): SEQ ID NO: 7719; WAN024CTC; Start 10; Stop 34
ttgtgcaattctggtgtagacgtta

SEQ ID NO: 475765 - DNA, 25 bp, Artificial
  probe
  misc_feature (1)..(25): SEQ ID NO: 7719; WAN024CTC; Start 71; Stop 95
cttcctcctacttatctattcgtag

SEQ ID NO: 475766 - DNA, 25 bp, Artificial
  probe
  misc_feature (1)..(25): SEQ ID NO: 7719; WAN024CTC; Start 13; Stop 37
tgcaattctggtgtagacgttaaac

SEQ ID NO: 475767 - DNA, 25 bp, Artificial
  probe
  misc_feature (1)..(25): SEQ ID NO: 7719; WAN024CTC; Start 12; Stop 36
gtgcaattctggtgtagacgttaaa

SEQ ID NO: 475768 - DNA, 25 bp, Artificial
  probe
  misc_feature (1)..(25): SEQ ID NO: 7719; WAN024CTC; Start 32; Stop 56
ttaaacgtccaatcaagataacttt

SEQ ID NO: 475769 - DNA, 25 bp, Artificial
  probe
  misc_feature (1)..(25): SEQ ID NO: 7719; WAN024CTC; Start 31; Stop 55
gttaaacgtccaatcaagataactt

SEQ ID NO: 475770 - DNA, 25 bp, Artificial
  probe
  misc_feature (1)..(25): SEQ ID NO: 7719; WAN024CTC; Start 35; Stop 59
aacgtccaatcaagataactttatt

SEQ ID NO: 475771 - DNA, 25 bp, Artificial
  probe
  misc_feature (1)..(25): SEQ ID NO: 7719; WAN024CTC; Start 34; Stop 58
aaacgtccaatcaagataactttat

SEQ ID NO: 475772 - DNA, 25 bp, Artificial
  probe
  misc_feature (1)..(25): SEQ ID NO: 7719; WAN024CTC; Start 30; Stop 54
cgttaaacgtccaatcaagataact

SEQ ID NO: 475773 - DNA, 25 bp, Artificial
  probe
  misc_feature (1)..(25): SEQ ID NO: 7719; WAN024CTC; Start 80; Stop 104
acttatctattcgtaggaaatcaaa

SEQ ID NO: 475774 - DNA, 25 bp, Artificial
  probe
  misc_feature (1)..(25): SEQ ID NO: 7719; WAN024CTC; Start 9; Stop 33
tttgtgcaattctggtgtagacgtt

SEQ ID NO: 475775 - DNA, 25 bp, Artificial
  probe
  misc_feature (1)..(25): SEQ ID NO: 7719; WAN024CTC; Start 33; Stop 57
taaacgtccaatcaagataacttta

SEQ ID NO: 475776 - DNA, 25 bp, Artificial
  probe
  misc_feature (1)..(25): SEQ ID NO: 7719; WAN024CTC; Start 36; Stop 60
acgtccaatcaagataactttatta

SEQ ID NO: 475777 - DNA, 25 bp, Artificial
  probe
  misc_feature (1)..(25): SEQ ID NO: 7719; WAN024CTC; Start 37; Stop 61
cgtccaatcaagataactttattat

SEQ ID NO: 475778 - DNA, 25 bp, Artificial
  probe
  misc_feature (1)..(25): SEQ ID NO: 7719; WAN024CTC; Start 79; Stop 103
tacttatctattcgtaggaaatcaa

SEQ ID NO: 475779 - DNA, 25 bp, Artificial
  probe
  misc_feature (1)..(25): SEQ ID NO: 7719; WAN024CTC; Start 14; Stop 38
gcaattctggtgtagacgttaaacg

SEQ ID NO: 475780 - DNA, 25 bp, Artificial
  probe
  misc_feature (1)..(25): SEQ ID NO: 7719; WAN024CTC; Start 4; Stop 28
ttggttttgtgcaattctggtgtag

SEQ ID NO: 475781 - DNA, 25 bp, Artificial
  probe
  misc_feature (1)..(25): SEQ ID NO: 7719; WAN024CTC; Start 3; Stop 27
gttggttttgtgcaattctggtgta

SEQ ID NO: 475782 - DNA, 25 bp, Artificial
  probe
  misc_feature (1)..(25): SEQ ID NO: 7719; WAN024CTC; Start 6; Stop 30
ggttttgtgcaattctggtgtagac

SEQ ID NO: 475783 - DNA, 25 bp, Artificial
  probe
  misc_feature (1)..(25): SEQ ID NO: 7719; WAN024CTC; Start 62; Stop 86
acatattttcttcctcctacttatc

SEQ ID NO: 475784 - DNA, 25 bp, Artificial
  probe
  misc_feature (1)..(25): SEQ ID NO: 7719; WAN024CTC; Start 5; Stop 29
tggttttgtgcaattctggtgtaga

SEQ ID NO: 475785 - DNA, 25 bp, Artificial
  probe
  misc_feature (1)..(25): SEQ ID NO: 7719; WAN024CTC; Start 7; Stop 31
gttttgtgcaattctggtgtagacg

SEQ ID NO: 475786 - DNA, 25 bp, Artificial
  probe
  misc_feature (1)..(25): SEQ ID NO: 7719; WAN024CTC; Start 78; Stop 102
ctacttatctattcgtaggaaatca

SEQ ID NO: 475787 - DNA, 25 bp, Artificial
  probe
  misc_feature (1)..(25): SEQ ID NO: 7719; WAN024CTC; Start 67; Stop 91
ttttcttcctcctacttatctattc

SEQ ID NO: 475788 - DNA, 25 bp, Artificial
  probe
  misc_feature (1)..(25): SEQ ID NO: 7719; WAN024CTC; Start 63; Stop 87
catattttcttcctcctacttatct

SEQ ID NO: 475789 - DNA, 25 bp, Artificial
  probe
  misc_feature (1)..(25): SEQ ID NO: 7719; WAN024CTC; Start 8; Stop 32
ttttgtgcaattctggtgtagacgt

SEQ ID NO: 475790 - DNA, 25 bp, Artificial
  probe
  misc_feature (1)..(25): SEQ ID NO: 7719; WAN024CTC; Start 112; Stop 136
acagaaatttgtaacttttcgagaa

SEQ ID NO: 475791 - DNA, 25 bp, Artificial
  probe
  misc_feature (1)..(25): SEQ ID NO: 7719; WAN024CTC; Start 1; Stop 25
ttgttggttttgtgcaattctggtg

SEQ ID NO: 475792 - DNA, 25 bp, Artificial
  probe
  misc_feature (1)..(25): SEQ ID NO: 7719; WAN024CTC; Start 111; Stop 135
tacagaaatttgtaacttttcgaga

SEQ ID NO: 475793 - DNA, 25 bp, Artificial
  probe
  misc_feature (1)..(25): SEQ ID NO: 7720; WAN024DIM; Start 196; Stop 220
gaagtcccattacggtttacaattt

SEQ ID NO: 475794 - DNA, 25 bp, Artificial
  probe
  misc_feature (1)..(25): SEQ ID NO: 7720; WAN024DIM; Start 191; Stop 215
tagatgaagtcccattacggtttac

SEQ ID NO: 475795 - DNA, 25 bp, Artificial
  probe
  misc_feature (1)..(25): SEQ ID NO: 7720; WAN024DIM; Start 189; Stop 213
tttagatgaagtcccattacggttt

SEQ ID NO: 475796 - DNA, 25 bp, Artificial
  probe
  misc_feature (1)..(25): SEQ ID NO: 7720; WAN024DIM; Start 194; Stop 218
atgaagtcccattacggtttacaat

SEQ ID NO: 475797 - DNA, 25 bp, Artificial
  probe
  misc_feature (1)..(25): SEQ ID NO: 7720; WAN024DIM; Start 190; Stop 214
ttagatgaagtcccattacggttta

SEQ ID NO: 475798 - DNA, 25 bp, Artificial
  probe
  misc_feature (1)..(25): SEQ ID NO: 7720; WAN024DIM; Start 195; Stop 219
tgaagtcccattacggtttacaatt

SEQ ID NO: 475799 - DNA, 25 bp, Artificial
  probe
  misc_feature (1)..(25): SEQ ID NO: 7720; WAN024DIM; Start 193; Stop 217
gatgaagtcccattacggtttacaa

SEQ ID NO: 475800 - DNA, 25 bp, Artificial
  probe
  misc_feature (1)..(25): SEQ ID NO: 7720; WAN024DIM; Start 192; Stop 216
agatgaagtcccattacggtttaca

SEQ ID NO: 475801 - DNA, 25 bp, Artificial
  probe
  misc_feature (1)..(25): SEQ ID NO: 7720; WAN024DIM; Start 29; Stop 53
attatctgcacctaagacaatcgct

SEQ ID NO: 475802 - DNA, 25 bp, Artificial
  probe
  misc_feature (1)..(25): SEQ ID NO: 7720; WAN024DIM; Start 28; Stop 52
cattatctgcacctaagacaatcgc

SEQ ID NO: 475803 - DNA, 25 bp, Artificial
  probe
  misc_feature (1)..(25): SEQ ID NO: 7720; WAN024DIM; Start 91; Stop 115
attcccatcatattattcccatcat

SEQ ID NO: 475804 - DNA, 25 bp, Artificial
  probe
  misc_feature (1)..(25): SEQ ID NO: 7720; WAN024DIM; Start 30; Stop 54
ttatctgcacctaagacaatcgctt

SEQ ID NO: 475805 - DNA, 25 bp, Artificial
  probe
  misc_feature (1)..(25): SEQ ID NO: 7720; WAN024DIM; Start 92; Stop 116
ttcccatcatattattcccatcata

SEQ ID NO: 475806 - DNA, 25 bp, Artificial
  probe
  misc_feature (1)..(25): SEQ ID NO: 7720; WAN024DIM; Start 90; Stop 114
tattcccatcatattattcccatca

SEQ ID NO: 475807 - DNA, 25 bp, Artificial
  probe
  misc_feature (1)..(25): SEQ ID NO: 7720; WAN024DIM; Start 24; Stop 48
taagcattatctgcacctaagacaa

SEQ ID NO: 475808 - DNA, 25 bp, Artificial
  probe
  misc_feature (1)..(25): SEQ ID NO: 7720; WAN024DIM; Start 23; Stop 47
ataagcattatctgcacctaagaca

SEQ ID NO: 475809 - DNA, 25 bp, Artificial
  probe
  misc_feature (1)..(25): SEQ ID NO: 7720; WAN024DIM; Start 17; Stop 41
atccatataagcattatctgcacct

SEQ ID NO: 475810 - DNA, 25 bp, Artificial
  probe
  misc_feature (1)..(25): SEQ ID NO: 7720; WAN024DIM; Start 25; Stop 49
aagcattatctgcacctaagacaat

SEQ ID NO: 475811 - DNA, 25 bp, Artificial
  probe
  misc_feature (1)..(25): SEQ ID NO: 7720; WAN024DIM; Start 26; Stop 50
agcattatctgcacctaagacaatc

SEQ ID NO: 475812 - DNA, 25 bp, Artificial
  probe
  misc_feature (1)..(25): SEQ ID NO: 7720; WAN024DIM; Start 18; Stop 42
tccatataagcattatctgcaccta

SEQ ID NO: 475813 - DNA, 25 bp, Artificial
  probe
  misc_feature (1)..(25): SEQ ID NO: 7720; WAN024DIM; Start 105; Stop 129
attcccatcatatgtttcccatcat

SEQ ID NO: 475814 - DNA, 25 bp, Artificial
  probe
  misc_feature (1)..(25): SEQ ID NO: 7720; WAN024DIM; Start 117; Stop 141
tgtttcccatcatatgtttctacgt

SEQ ID NO: 475815 - DNA, 25 bp, Artificial
  probe
  misc_feature (1)..(25): SEQ ID NO: 7720; WAN024DIM; Start 93; Stop 117
tcccatcatattattcccatcatat

SEQ ID NO: 475816 - DNA, 25 bp, Artificial
  probe
  misc_feature (1)..(25): SEQ ID NO: 7720; WAN024DIM; Start 225; Stop 249
attacgacacggagttttacaaatc

SEQ ID NO: 475817 - DNA, 25 bp, Artificial
  probe
  misc_feature (1)..(25): SEQ ID NO: 7720; WAN024DIM; Start 224; Stop 248
cattacgacacggagttttacaaat

SEQ ID NO: 475818 - DNA, 25 bp, Artificial
  probe
  misc_feature (1)..(25): SEQ ID NO: 7720; WAN024DIM; Start 220; Stop 244
tttacattacgacacggagttttac

SEQ ID NO: 475819 - DNA, 25 bp, Artificial
  probe
  misc_feature (1)..(25): SEQ ID NO: 7720; WAN024DIM; Start 145; Stop 169
cattattttcgcctattcgttcgta

SEQ ID NO: 475820 - DNA, 25 bp, Artificial
  probe
  misc_feature (1)..(25): SEQ ID NO: 7720; WAN024DIM; Start 140; Stop 164
gtaaccattattttcgcctattcgt

SEQ ID NO: 475821 - DNA, 25 bp, Artificial
  probe
  misc_feature (1)..(25): SEQ ID NO: 7720; WAN024DIM; Start 104; Stop 128
tattcccatcatatgtttcccatca

SEQ ID NO: 475822 - DNA, 25 bp, Artificial
  probe
  misc_feature (1)..(25): SEQ ID NO: 7720; WAN024DIM; Start 222; Stop 246
tacattacgacacggagttttacaa

SEQ ID NO: 475823 - DNA, 25 bp, Artificial
  probe
  misc_feature (1)..(25): SEQ ID NO: 7720; WAN024DIM; Start 221; Stop 245
ttacattacgacacggagttttaca

SEQ ID NO: 475824 - DNA, 25 bp, Artificial
  probe
  misc_feature (1)..(25): SEQ ID NO: 7720; WAN024DIM; Start 147; Stop 171
ttattttcgcctattcgttcgtaaa

SEQ ID NO: 475825 - DNA, 25 bp, Artificial
  probe
  misc_feature (1)..(25): SEQ ID NO: 7720; WAN024DIM; Start 146; Stop 170
attattttcgcctattcgttcgtaa

SEQ ID NO: 475826 - DNA, 25 bp, Artificial
  probe
  misc_feature (1)..(25): SEQ ID NO: 7721; WAN024F6L; Start 24; Stop 48
gatggttaagagtggtggagaatta

SEQ ID NO: 475827 - DNA, 25 bp, Artificial
  probe
  misc_feature (1)..(25): SEQ ID NO: 7721; WAN024F6L; Start 25; Stop 49
atggttaagagtggtggagaattat

SEQ ID NO: 475828 - DNA, 25 bp, Artificial
  probe
  misc_feature (1)..(25): SEQ ID NO: 7721; WAN024F6L; Start 26; Stop 50
tggttaagagtggtggagaattata

SEQ ID NO: 475829 - DNA, 25 bp, Artificial
  probe
  misc_feature (1)..(25): SEQ ID NO: 7721; WAN024F6L; Start 27; Stop 51
ggttaagagtggtggagaattatac

SEQ ID NO: 475830 - DNA, 25 bp, Artificial
  probe
  misc_feature (1)..(25): SEQ ID NO: 7721; WAN024F6L; Start 22; Stop 46
ttgatggttaagagtggtggagaat

SEQ ID NO: 475831 - DNA, 25 bp, Artificial
  probe
  misc_feature (1)..(25): SEQ ID NO: 7721; WAN024F6L; Start 23; Stop 47
tgatggttaagagtggtggagaatt

SEQ ID NO: 475832 - DNA, 25 bp, Artificial
  probe
  misc_feature (1)..(25): SEQ ID NO: 7721; WAN024F6L; Start 34; Stop 58
agtggtggagaattatactcaatga

SEQ ID NO: 475833 - DNA, 25 bp, Artificial
  probe
  misc_feature (1)..(25): SEQ ID NO: 7721; WAN024F6L; Start 35; Stop 59
gtggtggagaattatactcaatgaa

SEQ ID NO: 475834 - DNA, 25 bp, Artificial
  probe
  misc_feature (1)..(25): SEQ ID NO: 7721; WAN024F6L; Start 28; Stop 52
gttaagagtggtggagaattatact

SEQ ID NO: 475835 - DNA, 25 bp, Artificial
  probe
  misc_feature (1)..(25): SEQ ID NO: 7721; WAN024F6L; Start 21; Stop 45
tttgatggttaagagtggtggagaa

SEQ ID NO: 475836 - DNA, 25 bp, Artificial
  probe
  misc_feature (1)..(25): SEQ ID NO: 7721; WAN024F6L; Start 36; Stop 60
tggtggagaattatactcaatgaaa

SEQ ID NO: 475837 - DNA, 25 bp, Artificial
  probe
  misc_feature (1)..(25): SEQ ID NO: 7721; WAN024F6L; Start 31; Stop 55
aagagtggtggagaattatactcaa

SEQ ID NO: 475838 - DNA, 25 bp, Artificial
  probe
  misc_feature (1)..(25): SEQ ID NO: 7721; WAN024F6L; Start 33; Stop 57
gagtggtggagaattatactcaatg

SEQ ID NO: 475839 - DNA, 25 bp, Artificial
  probe
  misc_feature (1)..(25): SEQ ID NO: 7721; WAN024F6L; Start 32; Stop 56
agagtggtggagaattatactcaat

SEQ ID NO: 475840 - DNA, 25 bp, Artificial
  probe
  misc_feature (1)..(25): SEQ ID NO: 7721; WAN024F6L; Start 30; Stop 54
taagagtggtggagaattatactca

SEQ ID NO: 475841 - DNA, 25 bp, Artificial
  probe
  misc_feature (1)..(25): SEQ ID NO: 7721; WAN024F6L; Start 20; Stop 44
ttttgatggttaagagtggtggaga

SEQ ID NO: 475842 - DNA, 25 bp, Artificial
  probe
  misc_feature (1)..(25): SEQ ID NO: 7721; WAN024F6L; Start 29; Stop 53
ttaagagtggtggagaattatactc

SEQ ID NO: 475843 - DNA, 25 bp, Artificial
  probe
  misc_feature (1)..(25): SEQ ID NO: 7721; WAN024F6L; Start 37; Stop 61
ggtggagaattatactcaatgaaaa

SEQ ID NO: 475844 - DNA, 25 bp, Artificial
  probe
  misc_feature (1)..(25): SEQ ID NO: 7721; WAN024F6L; Start 38; Stop 62
gtggagaattatactcaatgaaaat

SEQ ID NO: 475845 - DNA, 25 bp, Artificial
  probe
  misc_feature (1)..(25): SEQ ID NO: 7721; WAN024F6L; Start 40; Stop 64
ggagaattatactcaatgaaaatca

SEQ ID NO: 475846 - DNA, 25 bp, Artificial
  probe
  misc_feature (1)..(25): SEQ ID NO: 7721; WAN024F6L; Start 39; Stop 63
tggagaattatactcaatgaaaatc

SEQ ID NO: 475847 - DNA, 25 bp, Artificial
  probe
  misc_feature (1)..(25): SEQ ID NO: 7722; WAN024BQ8; Start 52; Stop 76
cacacacagttatttgaaacatcct

SEQ ID NO: 475848 - DNA, 25 bp, Artificial
  probe
  misc_feature (1)..(25): SEQ ID NO: 7722; WAN024BQ8; Start 53; Stop 77
acacacagttatttgaaacatcctt

SEQ ID NO: 475849 - DNA, 25 bp, Artificial
  probe
  misc_feature (1)..(25): SEQ ID NO: 7722; WAN024BQ8; Start 51; Stop 75
tcacacacagttatttgaaacatcc

SEQ ID NO: 475850 - DNA, 25 bp, Artificial
  probe
  misc_feature (1)..(25): SEQ ID NO: 7722; WAN024BQ8; Start 49; Stop 73
cctcacacacagttatttgaaacat

SEQ ID NO: 475851 - DNA, 25 bp, Artificial
  probe
  misc_feature (1)..(25): SEQ ID NO: 7722; WAN024BQ8; Start 47; Stop 71
ttcctcacacacagttatttgaaac

SEQ ID NO: 475852 - DNA, 25 bp, Artificial
  probe
  misc_feature (1)..(25): SEQ ID NO: 7722; WAN024BQ8; Start 48; Stop 72
tcctcacacacagttatttgaaaca

SEQ ID NO: 475853 - DNA, 25 bp, Artificial
  probe
  misc_feature (1)..(25): SEQ ID NO: 7722; WAN024BQ8; Start 46; Stop 70
attcctcacacacagttatttgaaa

SEQ ID NO: 475854 - DNA, 25 bp, Artificial
  probe
  misc_feature (1)..(25): SEQ ID NO: 7722; WAN024BQ8; Start 50; Stop 74
ctcacacacagttatttgaaacatc

SEQ ID NO: 475855 - DNA, 25 bp, Artificial
  probe
  misc_feature (1)..(25): SEQ ID NO: 7722; WAN024BQ8; Start 45; Stop 69
tattcctcacacacagttatttgaa

SEQ ID NO: 475856 - DNA, 25 bp, Artificial
  probe
  misc_feature (1)..(25): SEQ ID NO: 7722; WAN024BQ8; Start 44; Stop 68
ttattcctcacacacagttatttga

SEQ ID NO: 475857 - DNA, 25 bp, Artificial
  probe
  misc_feature (1)..(25): SEQ ID NO: 7722; WAN024BQ8; Start 39; Stop 63
tgaaattattcctcacacacagtta

SEQ ID NO: 475858 - DNA, 25 bp, Artificial
  probe
  misc_feature (1)..(25): SEQ ID NO: 7722; WAN024BQ8; Start 43; Stop 67
attattcctcacacacagttatttg

SEQ ID NO: 475859 - DNA, 25 bp, Artificial
  probe
  misc_feature (1)..(25): SEQ ID NO: 7722; WAN024BQ8; Start 54; Stop 78
cacacagttatttgaaacatcctta

SEQ ID NO: 475860 - DNA, 25 bp, Artificial
  probe
  misc_feature (1)..(25): SEQ ID NO: 7722; WAN024BQ8; Start 55; Stop 79
acacagttatttgaaacatccttag

SEQ ID NO: 475861 - DNA, 25 bp, Artificial
  probe
  misc_feature (1)..(25): SEQ ID NO: 7722; WAN024BQ8; Start 40; Stop 64
gaaattattcctcacacacagttat

SEQ ID NO: 475862 - DNA, 25 bp, Artificial
  probe
  misc_feature (1)..(25): SEQ ID NO: 7722; WAN024BQ8; Start 56; Stop 80
cacagttatttgaaacatccttaga

SEQ ID NO: 475863 - DNA, 25 bp, Artificial
  probe
  misc_feature (1)..(25): SEQ ID NO: 7722; WAN024BQ8; Start 42; Stop 66
aattattcctcacacacagttattt

SEQ ID NO: 475864 - DNA, 25 bp, Artificial
  probe
  misc_feature (1)..(25): SEQ ID NO: 7722; WAN024BQ8; Start 57; Stop 81
acagttatttgaaacatccttagaa

SEQ ID NO: 475865 - DNA, 25 bp, Artificial
  probe
  misc_feature (1)..(25): SEQ ID NO: 7722; WAN024BQ8; Start 29; Stop 53
taagaaatggtgaaattattcctca

SEQ ID NO: 475866 - DNA, 25 bp, Artificial
  probe
  misc_feature (1)..(25): SEQ ID NO: 7722; WAN024BQ8; Start 58; Stop 82
cagttatttgaaacatccttagaaa

SEQ ID NO: 475867 - DNA, 25 bp, Artificial
  probe
  misc_feature (1)..(25): SEQ ID NO: 7722; WAN024BQ8; Start 28; Stop 52
ttaagaaatggtgaaattattcctc

SEQ ID NO: 475868 - DNA, 25 bp, Artificial
  probe
  misc_feature (1)..(25): SEQ ID NO: 7722; WAN024BQ8; Start 38; Stop 62
gtgaaattattcctcacacacagtt

SEQ ID NO: 475869 - DNA, 25 bp, Artificial
  probe
  misc_feature (1)..(25): SEQ ID NO: 7722; WAN024BQ8; Start 34; Stop 58
aatggtgaaattattcctcacacac

SEQ ID NO: 475870 - DNA, 25 bp, Artificial
  probe
  misc_feature (1)..(25): SEQ ID NO: 7722; WAN024BQ8; Start 35; Stop 59
atggtgaaattattcctcacacaca

SEQ ID NO: 475871 - DNA, 25 bp, Artificial
  probe
  misc_feature (1)..(25): SEQ ID NO: 7722; WAN024BQ8; Start 33; Stop 57
aaatggtgaaattattcctcacaca

SEQ ID NO: 475872 - DNA, 25 bp, Artificial
  probe
  misc_feature (1)..(25): SEQ ID NO: 7722; WAN024BQ8; Start 37; Stop 61
ggtgaaattattcctcacacacagt

SEQ ID NO: 475873 - DNA, 25 bp, Artificial
  probe
  misc_feature (1)..(25): SEQ ID NO: 7722; WAN024BQ8; Start 36; Stop 60
tggtgaaattattcctcacacacag

SEQ ID NO: 475874 - DNA, 25 bp, Artificial
  probe
  misc_feature (1)..(25): SEQ ID NO: 7722; WAN024BQ8; Start 32; Stop 56
gaaatggtgaaattattcctcacac

SEQ ID NO: 475875 - DNA, 25 bp, Artificial
  probe
  misc_feature (1)..(25): SEQ ID NO: 7722; WAN024BQ8; Start 31; Stop 55
agaaatggtgaaattattcctcaca

SEQ ID NO: 475876 - DNA, 25 bp, Artificial
  probe
  misc_feature (1)..(25): SEQ ID NO: 7722; WAN024BQ8; Start 30; Stop 54
aagaaatggtgaaattattcctcac

SEQ ID NO: 475877 - DNA, 25 bp, Artificial
  probe
  misc_feature (1)..(25): SEQ ID NO: 7722; WAN024BQ8; Start 64; Stop 88
tttgaaacatccttagaaaatgatt

SEQ ID NO: 475878 - DNA, 25 bp, Artificial
  probe
  misc_feature (1)..(25): SEQ ID NO: 7722; WAN024BQ8; Start 65; Stop 89
ttgaaacatccttagaaaatgattt

SEQ ID NO: 475879 - DNA, 25 bp, Artificial
  probe
  misc_feature (1)..(25): SEQ ID NO: 7722; WAN024BQ8; Start 63; Stop 87
atttgaaacatccttagaaaatgat

SEQ ID NO: 475880 - DNA, 25 bp, Artificial
  probe
  misc_feature (1)..(25): SEQ ID NO: 7723; WAN024GJG; Start 22; Stop 46
gaagcttgcttagtagaccattctt

SEQ ID NO: 475881 - DNA, 25 bp, Artificial
  probe
  misc_feature (1)..(25): SEQ ID NO: 7723; WAN024GJG; Start 1; Stop 25
ttgtttgaaaatcagaggaaggaag

SEQ ID NO: 475882 - DNA, 25 bp, Artificial
  probe
  misc_feature (1)..(25): SEQ ID NO: 7723; WAN024GJG; Start 19; Stop 43
aaggaagcttgcttagtagaccatt

SEQ ID NO: 475883 - DNA, 25 bp, Artificial
  probe
  misc_feature (1)..(25): SEQ ID NO: 7723; WAN024GJG; Start 2; Stop 26
tgtttgaaaatcagaggaaggaagc

SEQ ID NO: 475884 - DNA, 25 bp, Artificial
  probe
  misc_feature (1)..(25): SEQ ID NO: 7723; WAN024GJG; Start 20; Stop 44
aggaagcttgcttagtagaccattc

SEQ ID NO: 475885 - DNA, 25 bp, Artificial
  probe
  misc_feature (1)..(25): SEQ ID NO: 7723; WAN024GJG; Start 18; Stop 42
gaaggaagcttgcttagtagaccat

SEQ ID NO: 475886 - DNA, 25 bp, Artificial
  probe
  misc_feature (1)..(25): SEQ ID NO: 7723; WAN024GJG; Start 21; Stop 45
ggaagcttgcttagtagaccattct

SEQ ID NO: 475887 - DNA, 25 bp, Artificial
  probe
  misc_feature (1)..(25): SEQ ID NO: 7723; WAN024GJG; Start 10; Stop 34
aatcagaggaaggaagcttgcttag

SEQ ID NO: 475888 - DNA, 25 bp, Artificial
  probe
  misc_feature (1)..(25): SEQ ID NO: 7723; WAN024GJG; Start 15; Stop 39
gaggaaggaagcttgcttagtagac

SEQ ID NO: 475889 - DNA, 25 bp, Artificial
  probe
  misc_feature (1)..(25): SEQ ID NO: 7723; WAN024GJG; Start 13; Stop 37
cagaggaaggaagcttgcttagtag

SEQ ID NO: 475890 - DNA, 25 bp, Artificial
  probe
  misc_feature (1)..(25): SEQ ID NO: 7723; WAN024GJG; Start 24; Stop 48
agcttgcttagtagaccattctttt

SEQ ID NO: 475891 - DNA, 25 bp, Artificial
  probe
  misc_feature (1)..(25): SEQ ID NO: 7723; WAN024GJG; Start 14; Stop 38
agaggaaggaagcttgcttagtaga

SEQ ID NO: 475892 - DNA, 25 bp, Artificial
  probe
  misc_feature (1)..(25): SEQ ID NO: 7723; WAN024GJG; Start 23; Stop 47
aagcttgcttagtagaccattcttt

SEQ ID NO: 475893 - DNA, 25 bp, Artificial
  probe
  misc_feature (1)..(25): SEQ ID NO: 7723; WAN024GJG; Start 12; Stop 36
tcagaggaaggaagcttgcttagta

SEQ ID NO: 475894 - DNA, 25 bp, Artificial
  probe
  misc_feature (1)..(25): SEQ ID NO: 7723; WAN024GJG; Start 48; Stop 72
ttatctttatggggttgatagctgg

SEQ ID NO: 475895 - DNA, 25 bp, Artificial
  probe
  misc_feature (1)..(25): SEQ ID NO: 7723; WAN024GJG; Start 3; Stop 27
gtttgaaaatcagaggaaggaagct

SEQ ID NO: 475896 - DNA, 25 bp, Artificial
  probe
  misc_feature (1)..(25): SEQ ID NO: 7723; WAN024GJG; Start 47; Stop 71
tttatctttatggggttgatagctg

SEQ ID NO: 475897 - DNA, 25 bp, Artificial
  probe
  misc_feature (1)..(25): SEQ ID NO: 7723; WAN024GJG; Start 49; Stop 73
tatctttatggggttgatagctggg

SEQ ID NO: 475898 - DNA, 25 bp, Artificial
  probe
  misc_feature (1)..(25): SEQ ID NO: 7723; WAN024GJG; Start 11; Stop 35
atcagaggaaggaagcttgcttagt

SEQ ID NO: 475899 - DNA, 25 bp, Artificial
  probe
  misc_feature (1)..(25): SEQ ID NO: 7723; WAN024GJG; Start 9; Stop 33
aaatcagaggaaggaagcttgctta

SEQ ID NO: 475900 - DNA, 25 bp, Artificial
  probe
  misc_feature (1)..(25): SEQ ID NO: 7723; WAN024GJG; Start 46; Stop 70
ttttatctttatggggttgatagct

SEQ ID NO: 475901 - DNA, 25 bp, Artificial
  probe
  misc_feature (1)..(25): SEQ ID NO: 7723; WAN024GJG; Start 52; Stop 76
ctttatggggttgatagctgggttt

SEQ ID NO: 475902 - DNA, 25 bp, Artificial
  probe
  misc_feature (1)..(25): SEQ ID NO: 7723; WAN024GJG; Start 16; Stop 40
aggaaggaagcttgcttagtagacc

SEQ ID NO: 475903 - DNA, 25 bp, Artificial
  probe
  misc_feature (1)..(25): SEQ ID NO: 7723; WAN024GJG; Start 53; Stop 77
tttatggggttgatagctgggtttg

SEQ ID NO: 475904 - DNA, 25 bp, Artificial
  probe
  misc_feature (1)..(25): SEQ ID NO: 7723; WAN024GJG; Start 17; Stop 41
ggaaggaagcttgcttagtagacca

SEQ ID NO: 475905 - DNA, 25 bp, Artificial
  probe
  misc_feature (1)..(25): SEQ ID NO: 7723; WAN024GJG; Start 50; Stop 74
atctttatggggttgatagctgggt

SEQ ID NO: 475906 - DNA, 25 bp, Artificial
  probe
  misc_feature (1)..(25): SEQ ID NO: 7723; WAN024GJG; Start 51; Stop 75
tctttatggggttgatagctgggtt

SEQ ID NO: 475907 - DNA, 25 bp, Artificial
  probe
  misc_feature (1)..(25): SEQ ID NO: 7723; WAN024GJG; Start 4; Stop 28
tttgaaaatcagaggaaggaagctt

SEQ ID NO: 475908 - DNA, 25 bp, Artificial
  probe
  misc_feature (1)..(25): SEQ ID NO: 7723; WAN024GJG; Start 5; Stop 29
ttgaaaatcagaggaaggaagcttg

SEQ ID NO: 475909 - DNA, 25 bp, Artificial
  probe
  misc_feature (1)..(25): SEQ ID NO: 7723; WAN024GJG; Start 54; Stop 78
ttatggggttgatagctgggtttgg

SEQ ID NO: 475910 - DNA, 25 bp, Artificial
  probe
  misc_feature (1)..(25): SEQ ID NO: 7723; WAN024GJG; Start 8; Stop 32
aaaatcagaggaaggaagcttgctt

SEQ ID NO: 475911 - DNA, 25 bp, Artificial
  probe
  misc_feature (1)..(25): SEQ ID NO: 7723; WAN024GJG; Start 7; Stop 31
gaaaatcagaggaaggaagcttgct

SEQ ID NO: 475912 - DNA, 25 bp, Artificial
  probe
  misc_feature (1)..(25): SEQ ID NO: 7723; WAN024GJG; Start 6; Stop 30
tgaaaatcagaggaaggaagcttgc

SEQ ID NO: 475913 - DNA, 25 bp, Artificial
  probe
  misc_feature (1)..(25): SEQ ID NO: 7724; WAN024F2Q; Start 30; Stop 54
atgggatagcctttctaaatggttt

SEQ ID NO: 475914 - DNA, 25 bp, Artificial
  probe
  misc_feature (1)..(25): SEQ ID NO: 7724; WAN024F2Q; Start 37; Stop 61
agcctttctaaatggtttattgtgc

SEQ ID NO: 475915 - DNA, 25 bp, Artificial
  probe
  misc_feature (1)..(25): SEQ ID NO: 7724; WAN024F2Q; Start 31; Stop 55
tgggatagcctttctaaatggttta

SEQ ID NO: 475916 - DNA, 25 bp, Artificial
  probe
  misc_feature (1)..(25): SEQ ID NO: 7724; WAN024F2Q; Start 32; Stop 56
gggatagcctttctaaatggtttat

SEQ ID NO: 475917 - DNA, 25 bp, Artificial
  probe
  misc_feature (1)..(25): SEQ ID NO: 7724; WAN024F2Q; Start 129; Stop 153
agataagagactattgtcccagact

SEQ ID NO: 475918 - DNA, 25 bp, Artificial
  probe
  misc_feature (1)..(25): SEQ ID NO: 7724; WAN024F2Q; Start 130; Stop 154
gataagagactattgtcccagactc

SEQ ID NO: 475919 - DNA, 25 bp, Artificial
  probe
  misc_feature (1)..(25): SEQ ID NO: 7724; WAN024F2Q; Start 128; Stop 152
gagataagagactattgtcccagac

SEQ ID NO: 475920 - DNA, 25 bp, Artificial
  probe
  misc_feature (1)..(25): SEQ ID NO: 7724; WAN024F2Q; Start 29; Stop 53
catgggatagcctttctaaatggtt

SEQ ID NO: 475921 - DNA, 25 bp, Artificial
  probe
  misc_feature (1)..(25): SEQ ID NO: 7724; WAN024F2Q; Start 124; Stop 148
tttggagataagagactattgtccc

SEQ ID NO: 475922 - DNA, 25 bp, Artificial
  probe
  misc_feature (1)..(25): SEQ ID NO: 7724; WAN024F2Q; Start 127; Stop 151
ggagataagagactattgtcccaga

SEQ ID NO: 475923 - DNA, 25 bp, Artificial
  probe
  misc_feature (1)..(25): SEQ ID NO: 7724; WAN024F2Q; Start 125; Stop 149
ttggagataagagactattgtccca

SEQ ID NO: 475924 - DNA, 25 bp, Artificial
  probe
  misc_feature (1)..(25): SEQ ID NO: 7724; WAN024F2Q; Start 126; Stop 150
tggagataagagactattgtcccag

SEQ ID NO: 475925 - DNA, 25 bp, Artificial
  probe
  misc_feature (1)..(25): SEQ ID NO: 7724; WAN024F2Q; Start 36; Stop 60
tagcctttctaaatggtttattgtg

SEQ ID NO: 475926 - DNA, 25 bp, Artificial
  probe
  misc_feature (1)..(25): SEQ ID NO: 7724; WAN024F2Q; Start 38; Stop 62
gcctttctaaatggtttattgtgca

SEQ ID NO: 475927 - DNA, 25 bp, Artificial
  probe
  misc_feature (1)..(25): SEQ ID NO: 7724; WAN024F2Q; Start 33; Stop 57
ggatagcctttctaaatggtttatt

SEQ ID NO: 475928 - DNA, 25 bp, Artificial
  probe
  misc_feature (1)..(25): SEQ ID NO: 7724; WAN024F2Q; Start 67; Stop 91
tattttaccaagactatcgcaacca

SEQ ID NO: 475929 - DNA, 25 bp, Artificial
  probe
  misc_feature (1)..(25): SEQ ID NO: 7724; WAN024F2Q; Start 66; Stop 90
ctattttaccaagactatcgcaacc

SEQ ID NO: 475930 - DNA, 25 bp, Artificial
  probe
  misc_feature (1)..(25): SEQ ID NO: 7724; WAN024F2Q; Start 39; Stop 63
cctttctaaatggtttattgtgcaa

SEQ ID NO: 475931 - DNA, 25 bp, Artificial
  probe
  misc_feature (1)..(25): SEQ ID NO: 7724; WAN024F2Q; Start 68; Stop 92
attttaccaagactatcgcaaccat

SEQ ID NO: 475932 - DNA, 25 bp, Artificial
  probe
  misc_feature (1)..(25): SEQ ID NO: 7724; WAN024F2Q; Start 28; Stop 52
gcatgggatagcctttctaaatggt

SEQ ID NO: 475933 - DNA, 25 bp, Artificial
  probe
  misc_feature (1)..(25): SEQ ID NO: 7724; WAN024F2Q; Start 35; Stop 59
atagcctttctaaatggtttattgt

SEQ ID NO: 475934 - DNA, 25 bp, Artificial
  probe
  misc_feature (1)..(25): SEQ ID NO: 7724; WAN024F2Q; Start 65; Stop 89
tctattttaccaagactatcgcaac

SEQ ID NO: 475935 - DNA, 25 bp, Artificial
  probe
  misc_feature (1)..(25): SEQ ID NO: 7724; WAN024F2Q; Start 64; Stop 88
ttctattttaccaagactatcgcaa

SEQ ID NO: 475936 - DNA, 25 bp, Artificial
  probe
  misc_feature (1)..(25): SEQ ID NO: 7724; WAN024F2Q; Start 141; Stop 165
attgtcccagactcttttctttgta

SEQ ID NO: 475937 - DNA, 25 bp, Artificial
  probe
  misc_feature (1)..(25): SEQ ID NO: 7724; WAN024F2Q; Start 140; Stop 164
tattgtcccagactcttttctttgt

SEQ ID NO: 475938 - DNA, 25 bp, Artificial
  probe
  misc_feature (1)..(25): SEQ ID NO: 7724; WAN024F2Q; Start 138; Stop 162
actattgtcccagactcttttcttt

SEQ ID NO: 475939 - DNA, 25 bp, Artificial
  probe
  misc_feature (1)..(25): SEQ ID NO: 7724; WAN024F2Q; Start 137; Stop 161
gactattgtcccagactcttttctt

SEQ ID NO: 475940 - DNA, 25 bp, Artificial
  probe
  misc_feature (1)..(25): SEQ ID NO: 7724; WAN024F2Q; Start 43; Stop 67
tctaaatggtttattgtgcaattct

SEQ ID NO: 475941 - DNA, 25 bp, Artificial
  probe
  misc_feature (1)..(25): SEQ ID NO: 7724; WAN024F2Q; Start 139; Stop 163
ctattgtcccagactcttttctttg

SEQ ID NO: 475942 - DNA, 25 bp, Artificial
  probe
  misc_feature (1)..(25): SEQ ID NO: 7724; WAN024F2Q; Start 131; Stop 155
ataagagactattgtcccagactct

SEQ ID NO: 475943 - DNA, 25 bp, Artificial
  probe
  misc_feature (1)..(25): SEQ ID NO: 7724; WAN024F2Q; Start 34; Stop 58
gatagcctttctaaatggtttattg

SEQ ID NO: 475944 - DNA, 25 bp, Artificial
  probe
  misc_feature (1)..(25): SEQ ID NO: 7724; WAN024F2Q; Start 135; Stop 159
gagactattgtcccagactcttttc

SEQ ID NO: 475945 - DNA, 25 bp, Artificial
  probe
  misc_feature (1)..(25): SEQ ID NO: 7724; WAN024F2Q; Start 136; Stop 160
agactattgtcccagactcttttct

SEQ ID NO: 475946 - DNA, 25 bp, Artificial
  probe
  misc_feature (1)..(25): SEQ ID NO: 7725; WAN024CN8; Start 131; Stop 155
ttcctaatgcgacaatagtatccaa

SEQ ID NO: 475947 - DNA, 25 bp, Artificial
  probe
  misc_feature (1)..(25): SEQ ID NO: 7725; WAN024CN8; Start 132; Stop 156
tcctaatgcgacaatagtatccaac

SEQ ID NO: 475948 - DNA, 25 bp, Artificial
  probe
  misc_feature (1)..(25): SEQ ID NO: 7725; WAN024CN8; Start 106; Stop 130
gctctcaggttatctagtccactat

SEQ ID NO: 475949 - DNA, 25 bp, Artificial
  probe
  misc_feature (1)..(25): SEQ ID NO: 7725; WAN024CN8; Start 133; Stop 157
cctaatgcgacaatagtatccaacg

SEQ ID NO: 475950 - DNA, 25 bp, Artificial
  probe
  misc_feature (1)..(25): SEQ ID NO: 7725; WAN024CN8; Start 107; Stop 131
ctctcaggttatctagtccactatt

SEQ ID NO: 475951 - DNA, 25 bp, Artificial
  probe
  misc_feature (1)..(25): SEQ ID NO: 7725; WAN024CN8; Start 130; Stop 154
tttcctaatgcgacaatagtatcca

SEQ ID NO: 475952 - DNA, 25 bp, Artificial
  probe
  misc_feature (1)..(25): SEQ ID NO: 7725; WAN024CN8; Start 105; Stop 129
agctctcaggttatctagtccacta

SEQ ID NO: 475953 - DNA, 25 bp, Artificial
  probe
  misc_feature (1)..(25): SEQ ID NO: 7725; WAN024CN8; Start 134; Stop 158
ctaatgcgacaatagtatccaacgt

SEQ ID NO: 475954 - DNA, 25 bp, Artificial
  probe
  misc_feature (1)..(25): SEQ ID NO: 7725; WAN024CN8; Start 123; Stop 147
tccactatttcctaatgcgacaata

SEQ ID NO: 475955 - DNA, 25 bp, Artificial
  probe
  misc_feature (1)..(25): SEQ ID NO: 7725; WAN024CN8; Start 129; Stop 153
atttcctaatgcgacaatagtatcc

SEQ ID NO: 475956 - DNA, 25 bp, Artificial
  probe
  misc_feature (1)..(25): SEQ ID NO: 7725; WAN024CN8; Start 101; Stop 125
ttgaagctctcaggttatctagtcc

SEQ ID NO: 475957 - DNA, 25 bp, Artificial
  probe
  misc_feature (1)..(25): SEQ ID NO: 7725; WAN024CN8; Start 117; Stop 141
atctagtccactatttcctaatgcg

SEQ ID NO: 475958 - DNA, 25 bp, Artificial
  probe
  misc_feature (1)..(25): SEQ ID NO: 7725; WAN024CN8; Start 103; Stop 127
gaagctctcaggttatctagtccac

SEQ ID NO: 475959 - DNA, 25 bp, Artificial
  probe
  misc_feature (1)..(25): SEQ ID NO: 7725; WAN024CN8; Start 118; Stop 142
tctagtccactatttcctaatgcga

SEQ ID NO: 475960 - DNA, 25 bp, Artificial
  probe
  misc_feature (1)..(25): SEQ ID NO: 7725; WAN024CN8; Start 110; Stop 134
tcaggttatctagtccactatttcc

SEQ ID NO: 475961 - DNA, 25 bp, Artificial
  probe
  misc_feature (1)..(25): SEQ ID NO: 7725; WAN024CN8; Start 156; Stop 180
cgttgaagtctcattatttccgtta

SEQ ID NO: 475962 - DNA, 25 bp, Artificial
  probe
  misc_feature (1)..(25): SEQ ID NO: 7725; WAN024CN8; Start 104; Stop 128
aagctctcaggttatctagtccact

SEQ ID NO: 475963 - DNA, 25 bp, Artificial
  probe
  misc_feature (1)..(25): SEQ ID NO: 7725; WAN024CN8; Start 162; Stop 186
agtctcattatttccgttaaagtca

SEQ ID NO: 475964 - DNA, 25 bp, Artificial
  probe
  misc_feature (1)..(25): SEQ ID NO: 7725; WAN024CN8; Start 80; Stop 104
tcgcatataaacctacagtatttga

SEQ ID NO: 475965 - DNA, 25 bp, Artificial
  probe
  misc_feature (1)..(25): SEQ ID NO: 7725; WAN024CN8; Start 102; Stop 126
tgaagctctcaggttatctagtcca

SEQ ID NO: 475966 - DNA, 25 bp, Artificial
  probe
  misc_feature (1)..(25): SEQ ID NO: 7725; WAN024CN8; Start 108; Stop 132
tctcaggttatctagtccactattt

SEQ ID NO: 475967 - DNA, 25 bp, Artificial
  probe
  misc_feature (1)..(25): SEQ ID NO: 7725; WAN024CN8; Start 122; Stop 146
gtccactatttcctaatgcgacaat

SEQ ID NO: 475968 - DNA, 25 bp, Artificial
  probe
  misc_feature (1)..(25): SEQ ID NO: 7725; WAN024CN8; Start 119; Stop 143
ctagtccactatttcctaatgcgac

SEQ ID NO: 475969 - DNA, 25 bp, Artificial
  probe
  misc_feature (1)..(25): SEQ ID NO: 7725; WAN024CN8; Start 109; Stop 133
ctcaggttatctagtccactatttc

SEQ ID NO: 475970 - DNA, 25 bp, Artificial
  probe
  misc_feature (1)..(25): SEQ ID NO: 7725; WAN024CN8; Start 163; Stop 187
gtctcattatttccgttaaagtcaa

SEQ ID NO: 475971 - DNA, 25 bp, Artificial
  probe
  misc_feature (1)..(25): SEQ ID NO: 7725; WAN024CN8; Start 120; Stop 144
tagtccactatttcctaatgcgaca

SEQ ID NO: 475972 - DNA, 25 bp, Artificial
  probe
  misc_feature (1)..(25): SEQ ID NO: 7725; WAN024CN8; Start 111; Stop 135
caggttatctagtccactatttcct

SEQ ID NO: 475973 - DNA, 25 bp, Artificial
  probe
  misc_feature (1)..(25): SEQ ID NO: 7725; WAN024CN8; Start 161; Stop 185
aagtctcattatttccgttaaagtc

SEQ ID NO: 475974 - DNA, 25 bp, Artificial
  probe
  misc_feature (1)..(25): SEQ ID NO: 7725; WAN024CN8; Start 81; Stop 105
cgcatataaacctacagtatttgaa

SEQ ID NO: 475975 - DNA, 25 bp, Artificial
  probe
  misc_feature (1)..(25): SEQ ID NO: 7725; WAN024CN8; Start 79; Stop 103
ttcgcatataaacctacagtatttg

SEQ ID NO: 475976 - DNA, 25 bp, Artificial
  probe
  misc_feature (1)..(25): SEQ ID NO: 7725; WAN024CN8; Start 157; Stop 181
gttgaagtctcattatttccgttaa

SEQ ID NO: 475977 - DNA, 25 bp, Artificial
  probe
  misc_feature (1)..(25): SEQ ID NO: 7725; WAN024CN8; Start 88; Stop 112
aaacctacagtatttgaagctctca

SEQ ID NO: 475978 - DNA, 25 bp, Artificial
  probe
  misc_feature (1)..(25): SEQ ID NO: 7725; WAN024CN8; Start 100; Stop 124
tttgaagctctcaggttatctagtc

SEQ ID NO: 475979 - DNA, 25 bp, Artificial
  probe
  misc_feature (1)..(25): SEQ ID NO: 7726; WAN024BZG; Start 3; Stop 27
gttttcagtcatgcttttctccttt

SEQ ID NO: 475980 - DNA, 25 bp, Artificial
  probe
  misc_feature (1)..(25): SEQ ID NO: 7726; WAN024BZG; Start 4; Stop 28
ttttcagtcatgcttttctccttta

SEQ ID NO: 475981 - DNA, 25 bp, Artificial
  probe
  misc_feature (1)..(25): SEQ ID NO: 7726; WAN024BZG; Start 9; Stop 33
agtcatgcttttctcctttatttca

SEQ ID NO: 475982 - DNA, 25 bp, Artificial
  probe
  misc_feature (1)..(25): SEQ ID NO: 7726; WAN024BZG; Start 7; Stop 31
tcagtcatgcttttctcctttattt

SEQ ID NO: 475983 - DNA, 25 bp, Artificial
  probe
  misc_feature (1)..(25): SEQ ID NO: 7726; WAN024BZG; Start 6; Stop 30
ttcagtcatgcttttctcctttatt

SEQ ID NO: 475984 - DNA, 25 bp, Artificial
  probe
  misc_feature (1)..(25): SEQ ID NO: 7726; WAN024BZG; Start 5; Stop 29
tttcagtcatgcttttctcctttat

SEQ ID NO: 475985 - DNA, 25 bp, Artificial
  probe
  misc_feature (1)..(25): SEQ ID NO: 7726; WAN024BZG; Start 8; Stop 32
cagtcatgcttttctcctttatttc

SEQ ID NO: 475986 - DNA, 25 bp, Artificial
  probe
  misc_feature (1)..(25): SEQ ID NO: 7726; WAN024BZG; Start 2; Stop 26
tgttttcagtcatgcttttctcctt

SEQ ID NO: 475987 - DNA, 25 bp, Artificial
  probe
  misc_feature (1)..(25): SEQ ID NO: 7726; WAN024BZG; Start 1; Stop 25
ttgttttcagtcatgcttttctcct

SEQ ID NO: 475988 - DNA, 25 bp, Artificial
  probe
  misc_feature (1)..(25): SEQ ID NO: 7726; WAN024BZG; Start 10; Stop 34
gtcatgcttttctcctttatttcat

SEQ ID NO: 475989 - DNA, 25 bp, Artificial
  probe
  misc_feature (1)..(25): SEQ ID NO: 7726; WAN024BZG; Start 11; Stop 35
tcatgcttttctcctttatttcatt

SEQ ID NO: 475990 - DNA, 25 bp, Artificial
  probe
  misc_feature (1)..(25): SEQ ID NO: 7726; WAN024BZG; Start 12; Stop 36
catgcttttctcctttatttcattt

SEQ ID NO: 475991 - DNA, 25 bp, Artificial
  probe
  misc_feature (1)..(25): SEQ ID NO: 7726; WAN024BZG; Start 13; Stop 37
atgcttttctcctttatttcatttt

SEQ ID NO: 475992 - DNA, 25 bp, Artificial
  probe
  misc_feature (1)..(25): SEQ ID NO: 7726; WAN024BZG; Start 50; Stop 74
atacccctagtctatttatttcact

SEQ ID NO: 475993 - DNA, 25 bp, Artificial
  probe
  misc_feature (1)..(25): SEQ ID NO: 7726; WAN024BZG; Start 45; Stop 69
tctgaatacccctagtctatttatt

SEQ ID NO: 475994 - DNA, 25 bp, Artificial
  probe
  misc_feature (1)..(25): SEQ ID NO: 7726; WAN024BZG; Start 43; Stop 67
aatctgaatacccctagtctattta

SEQ ID NO: 475995 - DNA, 25 bp, Artificial
  probe
  misc_feature (1)..(25): SEQ ID NO: 7726; WAN024BZG; Start 42; Stop 66
taatctgaatacccctagtctattt

SEQ ID NO: 475996 - DNA, 25 bp, Artificial
  probe
  misc_feature (1)..(25): SEQ ID NO: 7726; WAN024BZG; Start 44; Stop 68
atctgaatacccctagtctatttat

SEQ ID NO: 475997 - DNA, 25 bp, Artificial
  probe
  misc_feature (1)..(25): SEQ ID NO: 7726; WAN024BZG; Start 41; Stop 65
ataatctgaatacccctagtctatt

SEQ ID NO: 475998 - DNA, 25 bp, Artificial
  probe
  misc_feature (1)..(25): SEQ ID NO: 7726; WAN024BZG; Start 14; Stop 38
tgcttttctcctttatttcatttta

SEQ ID NO: 475999 - DNA, 25 bp, Artificial
  probe
  misc_feature (1)..(25): SEQ ID NO: 7726; WAN024BZG; Start 49; Stop 73
aatacccctagtctatttatttcac

SEQ ID NO: 476000 - DNA, 25 bp, Artificial
  probe
  misc_feature (1)..(25): SEQ ID NO: 7726; WAN024BZG; Start 48; Stop 72
gaatacccctagtctatttatttca

SEQ ID NO: 476001 - DNA, 25 bp, Artificial
  probe
  misc_feature (1)..(25): SEQ ID NO: 7726; WAN024BZG; Start 47; Stop 71
tgaatacccctagtctatttatttc

SEQ ID NO: 476002 - DNA, 25 bp, Artificial
  probe
  misc_feature (1)..(25): SEQ ID NO: 7726; WAN024BZG; Start 46; Stop 70
ctgaatacccctagtctatttattt

SEQ ID NO: 476003 - DNA, 25 bp, Artificial
  probe
  misc_feature (1)..(25): SEQ ID NO: 7726; WAN024BZG; Start 51; Stop 75
tacccctagtctatttatttcacta

SEQ ID NO: 476004 - DNA, 25 bp, Artificial
  probe
  misc_feature (1)..(25): SEQ ID NO: 7726; WAN024BZG; Start 40; Stop 64
tataatctgaatacccctagtctat

SEQ ID NO: 476005 - DNA, 25 bp, Artificial
  probe
  misc_feature (1)..(25): SEQ ID NO: 7726; WAN024BZG; Start 39; Stop 63
ttataatctgaatacccctagtcta

SEQ ID NO: 476006 - DNA, 25 bp, Artificial
  probe
  misc_feature (1)..(25): SEQ ID NO: 7726; WAN024BZG; Start 38; Stop 62
attataatctgaatacccctagtct

SEQ ID NO: 476007 - DNA, 25 bp, Artificial
  probe
  misc_feature (1)..(25): SEQ ID NO: 7726; WAN024BZG; Start 52; Stop 76
acccctagtctatttatttcactag

SEQ ID NO: 476008 - DNA, 25 bp, Artificial
  probe
  misc_feature (1)..(25): SEQ ID NO: 7727; WAN024DLM; Start 110; Stop 134
ttacagatgatgcttgtgcttcttg

SEQ ID NO: 476009 - DNA, 25 bp, Artificial
  probe
  misc_feature (1)..(25): SEQ ID NO: 7727; WAN024DLM; Start 198; Stop 222
tttggcatctggtttagtagaatca

SEQ ID NO: 476010 - DNA, 25 bp, Artificial
  probe
  misc_feature (1)..(25): SEQ ID NO: 7727; WAN024DLM; Start 197; Stop 221
ctttggcatctggtttagtagaatc

SEQ ID NO: 476011 - DNA, 25 bp, Artificial
  probe
  misc_feature (1)..(25): SEQ ID NO: 7727; WAN024DLM; Start 196; Stop 220
actttggcatctggtttagtagaat

SEQ ID NO: 476012 - DNA, 25 bp, Artificial
  probe
  misc_feature (1)..(25): SEQ ID NO: 7727; WAN024DLM; Start 111; Stop 135
tacagatgatgcttgtgcttcttgt

SEQ ID NO: 476013 - DNA, 25 bp, Artificial
  probe
  misc_feature (1)..(25): SEQ ID NO: 7727; WAN024DLM; Start 203; Stop 227
catctggtttagtagaatcaggtct

SEQ ID NO: 476014 - DNA, 25 bp, Artificial
  probe
  misc_feature (1)..(25): SEQ ID NO: 7727; WAN024DLM; Start 199; Stop 223
ttggcatctggtttagtagaatcag

SEQ ID NO: 476015 - DNA, 25 bp, Artificial
  probe
  misc_feature (1)..(25): SEQ ID NO: 7727; WAN024DLM; Start 109; Stop 133
tttacagatgatgcttgtgcttctt

SEQ ID NO: 476016 - DNA, 25 bp, Artificial
  probe
  misc_feature (1)..(25): SEQ ID NO: 7727; WAN024DLM; Start 202; Stop 226
gcatctggtttagtagaatcaggtc

SEQ ID NO: 476017 - DNA, 25 bp, Artificial
  probe
  misc_feature (1)..(25): SEQ ID NO: 7727; WAN024DLM; Start 206; Stop 230
ctggtttagtagaatcaggtctagc

SEQ ID NO: 476018 - DNA, 25 bp, Artificial
  probe
  misc_feature (1)..(25): SEQ ID NO: 7727; WAN024DLM; Start 212; Stop 236
tagtagaatcaggtctagcttctgg

SEQ ID NO: 476019 - DNA, 25 bp, Artificial
  probe
  misc_feature (1)..(25): SEQ ID NO: 7727; WAN024DLM; Start 211; Stop 235
ttagtagaatcaggtctagcttctg

SEQ ID NO: 476020 - DNA, 25 bp, Artificial
  probe
  misc_feature (1)..(25): SEQ ID NO: 7727; WAN024DLM; Start 195; Stop 219
tactttggcatctggtttagtagaa

SEQ ID NO: 476021 - DNA, 25 bp, Artificial
  probe
  misc_feature (1)..(25): SEQ ID NO: 7727; WAN024DLM; Start 24; Stop 48
atttggaagttcagcttgtttatct

SEQ ID NO: 476022 - DNA, 25 bp, Artificial
  probe
  misc_feature (1)..(25): SEQ ID NO: 7727; WAN024DLM; Start 21; Stop 45
tgtatttggaagttcagcttgttta

SEQ ID NO: 476023 - DNA, 25 bp, Artificial
  probe
  misc_feature (1)..(25): SEQ ID NO: 7727; WAN024DLM; Start 205; Stop 229
tctggtttagtagaatcaggtctag

SEQ ID NO: 476024 - DNA, 25 bp, Artificial
  probe
  misc_feature (1)..(25): SEQ ID NO: 7727; WAN024DLM; Start 201; Stop 225
ggcatctggtttagtagaatcaggt

SEQ ID NO: 476025 - DNA, 25 bp, Artificial
  probe
  misc_feature (1)..(25): SEQ ID NO: 7727; WAN024DLM; Start 200; Stop 224
tggcatctggtttagtagaatcagg

SEQ ID NO: 476026 - DNA, 25 bp, Artificial
  probe
  misc_feature (1)..(25): SEQ ID NO: 7727; WAN024DLM; Start 214; Stop 238
gtagaatcaggtctagcttctggag

SEQ ID NO: 476027 - DNA, 25 bp, Artificial
  probe
  misc_feature (1)..(25): SEQ ID NO: 7727; WAN024DLM; Start 204; Stop 228
atctggtttagtagaatcaggtcta

SEQ ID NO: 476028 - DNA, 25 bp, Artificial
  probe
  misc_feature (1)..(25): SEQ ID NO: 7727; WAN024DLM; Start 25; Stop 49
tttggaagttcagcttgtttatctg

SEQ ID NO: 476029 - DNA, 25 bp, Artificial
  probe
  misc_feature (1)..(25): SEQ ID NO: 7727; WAN024DLM; Start 20; Stop 44
ctgtatttggaagttcagcttgttt

SEQ ID NO: 476030 - DNA, 25 bp, Artificial
  probe
  misc_feature (1)..(25): SEQ ID NO: 7727; WAN024DLM; Start 213; Stop 237
agtagaatcaggtctagcttctgga

SEQ ID NO: 476031 - DNA, 25 bp, Artificial
  probe
  misc_feature (1)..(25): SEQ ID NO: 7727; WAN024DLM; Start 22; Stop 46
gtatttggaagttcagcttgtttat

SEQ ID NO: 476032 - DNA, 25 bp, Artificial
  probe
  misc_feature (1)..(25): SEQ ID NO: 7727; WAN024DLM; Start 208; Stop 232
ggtttagtagaatcaggtctagctt

SEQ ID NO: 476033 - DNA, 25 bp, Artificial
  probe
  misc_feature (1)..(25): SEQ ID NO: 7727; WAN024DLM; Start 207; Stop 231
tggtttagtagaatcaggtctagct

SEQ ID NO: 476034 - DNA, 25 bp, Artificial
  probe
  misc_feature (1)..(25): SEQ ID NO: 7727; WAN024DLM; Start 26; Stop 50
ttggaagttcagcttgtttatctgg

SEQ ID NO: 476035 - DNA, 25 bp, Artificial
  probe
  misc_feature (1)..(25): SEQ ID NO: 7727; WAN024DLM; Start 23; Stop 47
tatttggaagttcagcttgtttatc

SEQ ID NO: 476036 - DNA, 25 bp, Artificial
  probe
  misc_feature (1)..(25): SEQ ID NO: 7727; WAN024DLM; Start 112; Stop 136
acagatgatgcttgtgcttcttgtg

SEQ ID NO: 476037 - DNA, 25 bp, Artificial
  probe
  misc_feature (1)..(25): SEQ ID NO: 7727; WAN024DLM; Start 19; Stop 43
cctgtatttggaagttcagcttgtt

SEQ ID NO: 476038 - DNA, 25 bp, Artificial
  probe
  misc_feature (1)..(25): SEQ ID NO: 7727; WAN024DLM; Start 209; Stop 233
gtttagtagaatcaggtctagcttc

SEQ ID NO: 476039 - DNA, 25 bp, Artificial
  probe
  misc_feature (1)..(25): SEQ ID NO: 7727; WAN024DLM; Start 189; Stop 213
atcagctactttggcatctggttta

SEQ ID NO: 476040 - DNA, 25 bp, Artificial
  probe
  misc_feature (1)..(25): SEQ ID NO: 7727; WAN024DLM; Start 192; Stop 216
agctactttggcatctggtttagta

SEQ ID NO: 476041 - DNA, 25 bp, Artificial
  probe
  misc_feature (1)..(25): SEQ ID NO: 7728; WAN024CMZ; Start 91; Stop 115
gttgatgagttgaagatgattcctg

SEQ ID NO: 476042 - DNA, 25 bp, Artificial
  probe
  misc_feature (1)..(25): SEQ ID NO: 7728; WAN024CMZ; Start 88; Stop 112
gtcgttgatgagttgaagatgattc

SEQ ID NO: 476043 - DNA, 25 bp, Artificial
  probe
  misc_feature (1)..(25): SEQ ID NO: 7728; WAN024CMZ; Start 87; Stop 111
ggtcgttgatgagttgaagatgatt

SEQ ID NO: 476044 - DNA, 25 bp, Artificial
  probe
  misc_feature (1)..(25): SEQ ID NO: 7728; WAN024CMZ; Start 90; Stop 114
cgttgatgagttgaagatgattcct

SEQ ID NO: 476045 - DNA, 25 bp, Artificial
  probe
  misc_feature (1)..(25): SEQ ID NO: 7728; WAN024CMZ; Start 89; Stop 113
tcgttgatgagttgaagatgattcc

SEQ ID NO: 476046 - DNA, 25 bp, Artificial
  probe
  misc_feature (1)..(25): SEQ ID NO: 7728; WAN024CMZ; Start 92; Stop 116
ttgatgagttgaagatgattcctgc

SEQ ID NO: 476047 - DNA, 25 bp, Artificial
  probe
  misc_feature (1)..(25): SEQ ID NO: 7728; WAN024CMZ; Start 84; Stop 108
attggtcgttgatgagttgaagatg

SEQ ID NO: 476048 - DNA, 25 bp, Artificial
  probe
  misc_feature (1)..(25): SEQ ID NO: 7728; WAN024CMZ; Start 83; Stop 107
cattggtcgttgatgagttgaagat

SEQ ID NO: 476049 - DNA, 25 bp, Artificial
  probe
  misc_feature (1)..(25): SEQ ID NO: 7728; WAN024CMZ; Start 86; Stop 110
tggtcgttgatgagttgaagatgat

SEQ ID NO: 476050 - DNA, 25 bp, Artificial
  probe
  misc_feature (1)..(25): SEQ ID NO: 7728; WAN024CMZ; Start 85; Stop 109
ttggtcgttgatgagttgaagatga

SEQ ID NO: 476051 - DNA, 25 bp, Artificial
  probe
  misc_feature (1)..(25): SEQ ID NO: 7728; WAN024CMZ; Start 95; Stop 119
atgagttgaagatgattcctgcaat

SEQ ID NO: 476052 - DNA, 25 bp, Artificial
  probe
  misc_feature (1)..(25): SEQ ID NO: 7728; WAN024CMZ; Start 94; Stop 118
gatgagttgaagatgattcctgcaa

SEQ ID NO: 476053 - DNA, 25 bp, Artificial
  probe
  misc_feature (1)..(25): SEQ ID NO: 7728; WAN024CMZ; Start 82; Stop 106
ccattggtcgttgatgagttgaaga

SEQ ID NO: 476054 - DNA, 25 bp, Artificial
  probe
  misc_feature (1)..(25): SEQ ID NO: 7728; WAN024CMZ; Start 93; Stop 117
tgatgagttgaagatgattcctgca

SEQ ID NO: 476055 - DNA, 25 bp, Artificial
  probe
  misc_feature (1)..(25): SEQ ID NO: 7728; WAN024CMZ; Start 63; Stop 87
attgaaatccaccttgtcaccattg

SEQ ID NO: 476056 - DNA, 25 bp, Artificial
  probe
  misc_feature (1)..(25): SEQ ID NO: 7728; WAN024CMZ; Start 62; Stop 86
gattgaaatccaccttgtcaccatt

SEQ ID NO: 476057 - DNA, 25 bp, Artificial
  probe
  misc_feature (1)..(25): SEQ ID NO: 7728; WAN024CMZ; Start 122; Stop 146
gcattcaatcaaatctctacatcga

SEQ ID NO: 476058 - DNA, 25 bp, Artificial
  probe
  misc_feature (1)..(25): SEQ ID NO: 7728; WAN024CMZ; Start 96; Stop 120
tgagttgaagatgattcctgcaatc

SEQ ID NO: 476059 - DNA, 25 bp, Artificial
  probe
  misc_feature (1)..(25): SEQ ID NO: 7728; WAN024CMZ; Start 121; Stop 145
tgcattcaatcaaatctctacatcg

SEQ ID NO: 476060 - DNA, 25 bp, Artificial
  probe
  misc_feature (1)..(25): SEQ ID NO: 7728; WAN024CMZ; Start 27; Stop 51
agcaaagttatttctcaaatcaaca

SEQ ID NO: 476061 - DNA, 25 bp, Artificial
  probe
  misc_feature (1)..(25): SEQ ID NO: 7728; WAN024CMZ; Start 97; Stop 121
gagttgaagatgattcctgcaatct

SEQ ID NO: 476062 - DNA, 25 bp, Artificial
  probe
  misc_feature (1)..(25): SEQ ID NO: 7728; WAN024CMZ; Start 98; Stop 122
agttgaagatgattcctgcaatctg

SEQ ID NO: 476063 - DNA, 25 bp, Artificial
  probe
  misc_feature (1)..(25): SEQ ID NO: 7728; WAN024CMZ; Start 119; Stop 143
tctgcattcaatcaaatctctacat

SEQ ID NO: 476064 - DNA, 25 bp, Artificial
  probe
  misc_feature (1)..(25): SEQ ID NO: 7728; WAN024CMZ; Start 118; Stop 142
atctgcattcaatcaaatctctaca

SEQ ID NO: 476065 - DNA, 25 bp, Artificial
  probe
  misc_feature (1)..(25): SEQ ID NO: 7728; WAN024CMZ; Start 120; Stop 144
ctgcattcaatcaaatctctacatc

SEQ ID NO: 476066 - DNA, 25 bp, Artificial
  probe
  misc_feature (1)..(25): SEQ ID NO: 7728; WAN024CMZ; Start 19; Stop 43
actagactagcaaagttatttctca

SEQ ID NO: 476067 - DNA, 25 bp, Artificial
  probe
  misc_feature (1)..(25): SEQ ID NO: 7728; WAN024CMZ; Start 28; Stop 52
gcaaagttatttctcaaatcaacat

SEQ ID NO: 476068 - DNA, 25 bp, Artificial
  probe
  misc_feature (1)..(25): SEQ ID NO: 7728; WAN024CMZ; Start 117; Stop 141
aatctgcattcaatcaaatctctac

SEQ ID NO: 476069 - DNA, 25 bp, Artificial
  probe
  misc_feature (1)..(25): SEQ ID NO: 7728; WAN024CMZ; Start 116; Stop 140
caatctgcattcaatcaaatctcta

SEQ ID NO: 476070 - DNA, 25 bp, Artificial
  probe
  misc_feature (1)..(25): SEQ ID NO: 7728; WAN024CMZ; Start 24; Stop 48
actagcaaagttatttctcaaatca

SEQ ID NO: 476071 - DNA, 25 bp, Artificial
  probe
  misc_feature (1)..(25): SEQ ID NO: 7728; WAN024CMZ; Start 40; Stop 64
ctcaaatcaacattttctgtgggat

SEQ ID NO: 476072 - DNA, 25 bp, Artificial
  probe
  misc_feature (1)..(25): SEQ ID NO: 7728; WAN024CMZ; Start 38; Stop 62
ttctcaaatcaacattttctgtggg

SEQ ID NO: 476073 - DNA, 25 bp, Artificial
  probe
  misc_feature (1)..(25): SEQ ID NO: 7728; WAN024CMZ; Start 20; Stop 44
ctagactagcaaagttatttctcaa

SEQ ID NO: 476074 - DNA, 25 bp, Artificial
  probe
  misc_feature (1)..(25): SEQ ID NO: 7729; WAN024AYA; Start 403; Stop 427
cggttgacgcattatacttatgaag

SEQ ID NO: 476075 - DNA, 25 bp, Artificial
  probe
  misc_feature (1)..(25): SEQ ID NO: 7729; WAN024AYA; Start 407; Stop 431
tgacgcattatacttatgaagaggt

SEQ ID NO: 476076 - DNA, 25 bp, Artificial
  probe
  misc_feature (1)..(25): SEQ ID NO: 7729; WAN024AYA; Start 402; Stop 426
acggttgacgcattatacttatgaa

SEQ ID NO: 476077 - DNA, 25 bp, Artificial
  probe
  misc_feature (1)..(25): SEQ ID NO: 7729; WAN024AYA; Start 401; Stop 425
aacggttgacgcattatacttatga

SEQ ID NO: 476078 - DNA, 25 bp, Artificial
  probe
  misc_feature (1)..(25): SEQ ID NO: 7729; WAN024AYA; Start 404; Stop 428
ggttgacgcattatacttatgaaga

SEQ ID NO: 476079 - DNA, 25 bp, Artificial
  probe
  misc_feature (1)..(25): SEQ ID NO: 7729; WAN024AYA; Start 154; Stop 178
gagtcagattcagagattgatgtct

SEQ ID NO: 476080 - DNA, 25 bp, Artificial
  probe
  misc_feature (1)..(25): SEQ ID NO: 7729; WAN024AYA; Start 153; Stop 177
tgagtcagattcagagattgatgtc

SEQ ID NO: 476081 - DNA, 25 bp, Artificial
  probe
  misc_feature (1)..(25): SEQ ID NO: 7729; WAN024AYA; Start 408; Stop 432
gacgcattatacttatgaagaggtt

SEQ ID NO: 476082 - DNA, 25 bp, Artificial
  probe
  misc_feature (1)..(25): SEQ ID NO: 7729; WAN024AYA; Start 406; Stop 430
ttgacgcattatacttatgaagagg

SEQ ID NO: 476083 - DNA, 25 bp, Artificial
  probe
  misc_feature (1)..(25): SEQ ID NO: 7729; WAN024AYA; Start 157; Stop 181
tcagattcagagattgatgtcttga

SEQ ID NO: 476084 - DNA, 25 bp, Artificial
  probe
  misc_feature (1)..(25): SEQ ID NO: 7729; WAN024AYA; Start 156; Stop 180
gtcagattcagagattgatgtcttg

SEQ ID NO: 476085 - DNA, 25 bp, Artificial
  probe
  misc_feature (1)..(25): SEQ ID NO: 7729; WAN024AYA; Start 155; Stop 179
agtcagattcagagattgatgtctt

SEQ ID NO: 476086 - DNA, 25 bp, Artificial
  probe
  misc_feature (1)..(25): SEQ ID NO: 7729; WAN024AYA; Start 152; Stop 176
atgagtcagattcagagattgatgt

SEQ ID NO: 476087 - DNA, 25 bp, Artificial
  probe
  misc_feature (1)..(25): SEQ ID NO: 7729; WAN024AYA; Start 164; Stop 188
cagagattgatgtcttgattaacca

SEQ ID NO: 476088 - DNA, 25 bp, Artificial
  probe
  misc_feature (1)..(25): SEQ ID NO: 7729; WAN024AYA; Start 149; Stop 173
tgtatgagtcagattcagagattga

SEQ ID NO: 476089 - DNA, 25 bp, Artificial
  probe
  misc_feature (1)..(25): SEQ ID NO: 7729; WAN024AYA; Start 158; Stop 182
cagattcagagattgatgtcttgat

SEQ ID NO: 476090 - DNA, 25 bp, Artificial
  probe
  misc_feature (1)..(25): SEQ ID NO: 7729; WAN024AYA; Start 513; Stop 537
agttcttcggacagcaatctatcaa

SEQ ID NO: 476091 - DNA, 25 bp, Artificial
  probe
  misc_feature (1)..(25): SEQ ID NO: 7729; WAN024AYA; Start 512; Stop 536
aagttcttcggacagcaatctatca

SEQ ID NO: 476092 - DNA, 25 bp, Artificial
  probe
  misc_feature (1)..(25): SEQ ID NO: 7729; WAN024AYA; Start 163; Stop 187
tcagagattgatgtcttgattaacc

SEQ ID NO: 476093 - DNA, 25 bp, Artificial
  probe
  misc_feature (1)..(25): SEQ ID NO: 7729; WAN024AYA; Start 147; Stop 171
gctgtatgagtcagattcagagatt

SEQ ID NO: 476094 - DNA, 25 bp, Artificial
  probe
  misc_feature (1)..(25): SEQ ID NO: 7729; WAN024AYA; Start 208; Stop 232
cgaggtaataatgtagcatatcagt

SEQ ID NO: 476095 - DNA, 25 bp, Artificial
  probe
  misc_feature (1)..(25): SEQ ID NO: 7729; WAN024AYA; Start 405; Stop 429
gttgacgcattatacttatgaagag

SEQ ID NO: 476096 - DNA, 25 bp, Artificial
  probe
  misc_feature (1)..(25): SEQ ID NO: 7729; WAN024AYA; Start 165; Stop 189
agagattgatgtcttgattaaccat

SEQ ID NO: 476097 - DNA, 25 bp, Artificial
  probe
  misc_feature (1)..(25): SEQ ID NO: 7729; WAN024AYA; Start 148; Stop 172
ctgtatgagtcagattcagagattg

SEQ ID NO: 476098 - DNA, 25 bp, Artificial
  probe
  misc_feature (1)..(25): SEQ ID NO: 7729; WAN024AYA; Start 159; Stop 183
agattcagagattgatgtcttgatt

SEQ ID NO: 476099 - DNA, 25 bp, Artificial
  probe
  misc_feature (1)..(25): SEQ ID NO: 7729; WAN024AYA; Start 151; Stop 175
tatgagtcagattcagagattgatg

SEQ ID NO: 476100 - DNA, 25 bp, Artificial
  probe
  misc_feature (1)..(25): SEQ ID NO: 7729; WAN024AYA; Start 150; Stop 174
gtatgagtcagattcagagattgat

SEQ ID NO: 476101 - DNA, 25 bp, Artificial
  probe
  misc_feature (1)..(25): SEQ ID NO: 7729; WAN024AYA; Start 409; Stop 433
acgcattatacttatgaagaggtta

SEQ ID NO: 476102 - DNA, 25 bp, Artificial
  probe
  misc_feature (1)..(25): SEQ ID NO: 7729; WAN024AYA; Start 167; Stop 191
agattgatgtcttgattaaccatga

SEQ ID NO: 476103 - DNA, 25 bp, Artificial
  probe
  misc_feature (1)..(25): SEQ ID NO: 7729; WAN024AYA; Start 510; Stop 534
taaagttcttcggacagcaatctat

SEQ ID NO: 476104 - DNA, 25 bp, Artificial
  probe
  misc_feature (1)..(25): SEQ ID NO: 7729; WAN024AYA; Start 166; Stop 190
gagattgatgtcttgattaaccatg

SEQ ID NO: 476105 - DNA, 25 bp, Artificial
  probe
  misc_feature (1)..(25): SEQ ID NO: 7729; WAN024AYA; Start 450; Stop 474
atttaagaaagggagccaagttagt

SEQ ID NO: 476106 - DNA, 25 bp, Artificial
  probe
  misc_feature (1)..(25): SEQ ID NO: 7729; WAN024AYA; Start 451; Stop 475
tttaagaaagggagccaagttagtc

SEQ ID NO: 476107 - DNA, 25 bp, Artificial
  probe
  misc_feature (1)..(25): SEQ ID NO: 7730; WAN0249D6; Start 30; Stop 54
gcagataacaagcatctataataca

SEQ ID NO: 476108 - DNA, 25 bp, Artificial
  probe
  misc_feature (1)..(25): SEQ ID NO: 7730; WAN0249D6; Start 91; Stop 115
agccaaaccttttctattttacctt

SEQ ID NO: 476109 - DNA, 25 bp, Artificial
  probe
  misc_feature (1)..(25): SEQ ID NO: 7730; WAN0249D6; Start 96; Stop 120
aaccttttctattttaccttgctct

SEQ ID NO: 476110 - DNA, 25 bp, Artificial
  probe
  misc_feature (1)..(25): SEQ ID NO: 7730; WAN0249D6; Start 93; Stop 117
ccaaaccttttctattttaccttgc

SEQ ID NO: 476111 - DNA, 25 bp, Artificial
  probe
  misc_feature (1)..(25): SEQ ID NO: 7730; WAN0249D6; Start 92; Stop 116
gccaaaccttttctattttaccttg

SEQ ID NO: 476112 - DNA, 25 bp, Artificial
  probe
  misc_feature (1)..(25): SEQ ID NO: 7730; WAN0249D6; Start 90; Stop 114
tagccaaaccttttctattttacct

SEQ ID NO: 476113 - DNA, 25 bp, Artificial
  probe
  misc_feature (1)..(25): SEQ ID NO: 7730; WAN0249D6; Start 95; Stop 119
aaaccttttctattttaccttgctc

SEQ ID NO: 476114 - DNA, 25 bp, Artificial
  probe
  misc_feature (1)..(25): SEQ ID NO: 7730; WAN0249D6; Start 97; Stop 121
accttttctattttaccttgctcta

SEQ ID NO: 476115 - DNA, 25 bp, Artificial
  probe
  misc_feature (1)..(25): SEQ ID NO: 7730; WAN0249D6; Start 94; Stop 118
caaaccttttctattttaccttgct

SEQ ID NO: 476116 - DNA, 25 bp, Artificial
  probe
  misc_feature (1)..(25): SEQ ID NO: 7730; WAN0249D6; Start 89; Stop 113
ttagccaaaccttttctattttacc

SEQ ID NO: 476117 - DNA, 25 bp, Artificial
  probe
  misc_feature (1)..(25): SEQ ID NO: 7730; WAN0249D6; Start 98; Stop 122
ccttttctattttaccttgctctag

SEQ ID NO: 476118 - DNA, 25 bp, Artificial
  probe
  misc_feature (1)..(25): SEQ ID NO: 7730; WAN0249D6; Start 29; Stop 53
tgcagataacaagcatctataatac

SEQ ID NO: 476119 - DNA, 25 bp, Artificial
  probe
  misc_feature (1)..(25): SEQ ID NO: 7730; WAN0249D6; Start 28; Stop 52
ttgcagataacaagcatctataata

SEQ ID NO: 476120 - DNA, 25 bp, Artificial
  probe
  misc_feature (1)..(25): SEQ ID NO: 7730; WAN0249D6; Start 88; Stop 112
tttagccaaaccttttctattttac

SEQ ID NO: 476121 - DNA, 25 bp, Artificial
  probe
  misc_feature (1)..(25): SEQ ID NO: 7730; WAN0249D6; Start 86; Stop 110
attttagccaaaccttttctatttt

SEQ ID NO: 476122 - DNA, 25 bp, Artificial
  probe
  misc_feature (1)..(25): SEQ ID NO: 7730; WAN0249D6; Start 85; Stop 109
aattttagccaaaccttttctattt

SEQ ID NO: 476123 - DNA, 25 bp, Artificial
  probe
  misc_feature (1)..(25): SEQ ID NO: 7730; WAN0249D6; Start 27; Stop 51
tttgcagataacaagcatctataat

SEQ ID NO: 476124 - DNA, 25 bp, Artificial
  probe
  misc_feature (1)..(25): SEQ ID NO: 7730; WAN0249D6; Start 26; Stop 50
atttgcagataacaagcatctataa

SEQ ID NO: 476125 - DNA, 25 bp, Artificial
  probe
  misc_feature (1)..(25): SEQ ID NO: 7730; WAN0249D6; Start 56; Stop 80
acttaacttttcaaaaggtttagct

SEQ ID NO: 476126 - DNA, 25 bp, Artificial
  probe
  misc_feature (1)..(25): SEQ ID NO: 7730; WAN0249D6; Start 87; Stop 111
ttttagccaaaccttttctatttta

SEQ ID NO: 476127 - DNA, 25 bp, Artificial
  probe
  misc_feature (1)..(25): SEQ ID NO: 7730; WAN0249D6; Start 84; Stop 108
aaattttagccaaaccttttctatt

SEQ ID NO: 476128 - DNA, 25 bp, Artificial
  probe
  misc_feature (1)..(25): SEQ ID NO: 7730; WAN0249D6; Start 55; Stop 79
tacttaacttttcaaaaggtttagc

SEQ ID NO: 476129 - DNA, 25 bp, Artificial
  probe
  misc_feature (1)..(25): SEQ ID NO: 7730; WAN0249D6; Start 99; Stop 123
cttttctattttaccttgctctaga

SEQ ID NO: 476130 - DNA, 25 bp, Artificial
  probe
  misc_feature (1)..(25): SEQ ID NO: 7730; WAN0249D6; Start 52; Stop 76
acatacttaacttttcaaaaggttt

SEQ ID NO: 476131 - DNA, 25 bp, Artificial
  probe
  misc_feature (1)..(25): SEQ ID NO: 7730; WAN0249D6; Start 104; Stop 128
ctattttaccttgctctagaatttt

SEQ ID NO: 476132 - DNA, 25 bp, Artificial
  probe
  misc_feature (1)..(25): SEQ ID NO: 7730; WAN0249D6; Start 103; Stop 127
tctattttaccttgctctagaattt

SEQ ID NO: 476133 - DNA, 25 bp, Artificial
  probe
  misc_feature (1)..(25): SEQ ID NO: 7730; WAN0249D6; Start 57; Stop 81
cttaacttttcaaaaggtttagcta

SEQ ID NO: 476134 - DNA, 25 bp, Artificial
  probe
  misc_feature (1)..(25): SEQ ID NO: 7730; WAN0249D6; Start 51; Stop 75
tacatacttaacttttcaaaaggtt

SEQ ID NO: 476135 - DNA, 25 bp, Artificial
  probe
  misc_feature (1)..(25): SEQ ID NO: 7730; WAN0249D6; Start 83; Stop 107
aaaattttagccaaaccttttctat

SEQ ID NO: 476136 - DNA, 25 bp, Artificial
  probe
  misc_feature (1)..(25): SEQ ID NO: 7730; WAN0249D6; Start 100; Stop 124
ttttctattttaccttgctctagaa

SEQ ID NO: 476137 - DNA, 25 bp, Artificial
  probe
  misc_feature (1)..(25): SEQ ID NO: 7730; WAN0249D6; Start 102; Stop 126
ttctattttaccttgctctagaatt

SEQ ID NO: 476138 - DNA, 25 bp, Artificial
  probe
  misc_feature (1)..(25): SEQ ID NO: 7730; WAN0249D6; Start 101; Stop 125
tttctattttaccttgctctagaat

SEQ ID NO: 476139 - DNA, 25 bp, Artificial
  probe
  misc_feature (1)..(25): SEQ ID NO: 7731; WAN0249D7; Start 49; Stop 73
ataaggttatcaaagaagacttccc

SEQ ID NO: 476140 - DNA, 25 bp, Artificial
  probe
  misc_feature (1)..(25): SEQ ID NO: 7731; WAN0249D7; Start 30; Stop 54
gcagataacaagcatctatataagg

SEQ ID NO: 476141 - DNA, 25 bp, Artificial
  probe
  misc_feature (1)..(25): SEQ ID NO: 7731; WAN0249D7; Start 37; Stop 61
acaagcatctatataaggttatcaa

SEQ ID NO: 476142 - DNA, 25 bp, Artificial
  probe
  misc_feature (1)..(25): SEQ ID NO: 7731; WAN0249D7; Start 50; Stop 74
taaggttatcaaagaagacttcccc

SEQ ID NO: 476143 - DNA, 25 bp, Artificial
  probe
  misc_feature (1)..(25): SEQ ID NO: 7731; WAN0249D7; Start 36; Stop 60
aacaagcatctatataaggttatca

SEQ ID NO: 476144 - DNA, 25 bp, Artificial
  probe
  misc_feature (1)..(25): SEQ ID NO: 7731; WAN0249D7; Start 31; Stop 55
cagataacaagcatctatataaggt

SEQ ID NO: 476145 - DNA, 25 bp, Artificial
  probe
  misc_feature (1)..(25): SEQ ID NO: 7731; WAN0249D7; Start 48; Stop 72
tataaggttatcaaagaagacttcc

SEQ ID NO: 476146 - DNA, 25 bp, Artificial
  probe
  misc_feature (1)..(25): SEQ ID NO: 7731; WAN0249D7; Start 29; Stop 53
tgcagataacaagcatctatataag

SEQ ID NO: 476147 - DNA, 25 bp, Artificial
  probe
  misc_feature (1)..(25): SEQ ID NO: 7731; WAN0249D7; Start 32; Stop 56
agataacaagcatctatataaggtt

SEQ ID NO: 476148 - DNA, 25 bp, Artificial
  probe
  misc_feature (1)..(25): SEQ ID NO: 7731; WAN0249D7; Start 28; Stop 52
ttgcagataacaagcatctatataa

SEQ ID NO: 476149 - DNA, 25 bp, Artificial
  probe
  misc_feature (1)..(25): SEQ ID NO: 7731; WAN0249D7; Start 40; Stop 64
agcatctatataaggttatcaaaga

SEQ ID NO: 476150 - DNA, 25 bp, Artificial
  probe
  misc_feature (1)..(25): SEQ ID NO: 7731; WAN0249D7; Start 26; Stop 50
atttgcagataacaagcatctatat

SEQ ID NO: 476151 - DNA, 25 bp, Artificial
  probe
  misc_feature (1)..(25): SEQ ID NO: 7731; WAN0249D7; Start 27; Stop 51
tttgcagataacaagcatctatata

SEQ ID NO: 476152 - DNA, 25 bp, Artificial
  probe
  misc_feature (1)..(25): SEQ ID NO: 7732; WAN0249P2; Start 17; Stop 41
tagatattatcacggttaaggcagc

SEQ ID NO: 476153 - DNA, 25 bp, Artificial
  probe
  misc_feature (1)..(25): SEQ ID NO: 7732; WAN0249P2; Start 20; Stop 44
atattatcacggttaaggcagcatc

SEQ ID NO: 476154 - DNA, 25 bp, Artificial
  probe
  misc_feature (1)..(25): SEQ ID NO: 7732; WAN0249P2; Start 19; Stop 43
gatattatcacggttaaggcagcat

SEQ ID NO: 476155 - DNA, 25 bp, Artificial
  probe
  misc_feature (1)..(25): SEQ ID NO: 7732; WAN0249P2; Start 16; Stop 40
ttagatattatcacggttaaggcag

SEQ ID NO: 476156 - DNA, 25 bp, Artificial
  probe
  misc_feature (1)..(25): SEQ ID NO: 7732; WAN0249P2; Start 21; Stop 45
tattatcacggttaaggcagcatct

SEQ ID NO: 476157 - DNA, 25 bp, Artificial
  probe
  misc_feature (1)..(25): SEQ ID NO: 7732; WAN0249P2; Start 18; Stop 42
agatattatcacggttaaggcagca

SEQ ID NO: 476158 - DNA, 25 bp, Artificial
  probe
  misc_feature (1)..(25): SEQ ID NO: 7732; WAN0249P2; Start 15; Stop 39
attagatattatcacggttaaggca

SEQ ID NO: 476159 - DNA, 25 bp, Artificial
  probe
  misc_feature (1)..(25): SEQ ID NO: 7732; WAN0249P2; Start 14; Stop 38
gattagatattatcacggttaaggc

SEQ ID NO: 476160 - DNA, 25 bp, Artificial
  probe
  misc_feature (1)..(25): SEQ ID NO: 7732; WAN0249P2; Start 22; Stop 46
attatcacggttaaggcagcatctc

SEQ ID NO: 476161 - DNA, 25 bp, Artificial
  probe
  misc_feature (1)..(25): SEQ ID NO: 7732; WAN0249P2; Start 57; Stop 81
aaataaagaggtttggaagacatca

SEQ ID NO: 476162 - DNA, 25 bp, Artificial
  probe
  misc_feature (1)..(25): SEQ ID NO: 7732; WAN0249P2; Start 55; Stop 79
tgaaataaagaggtttggaagacat

SEQ ID NO: 476163 - DNA, 25 bp, Artificial
  probe
  misc_feature (1)..(25): SEQ ID NO: 7732; WAN0249P2; Start 54; Stop 78
atgaaataaagaggtttggaagaca

SEQ ID NO: 476164 - DNA, 25 bp, Artificial
  probe
  misc_feature (1)..(25): SEQ ID NO: 7732; WAN0249P2; Start 30; Stop 54
ggttaaggcagcatctcattaaata

SEQ ID NO: 476165 - DNA, 25 bp, Artificial
  probe
  misc_feature (1)..(25): SEQ ID NO: 7732; WAN0249P2; Start 70; Stop 94
tggaagacatcaaattctaaacctc

SEQ ID NO: 476166 - DNA, 25 bp, Artificial
  probe
  misc_feature (1)..(25): SEQ ID NO: 7732; WAN0249P2; Start 71; Stop 95
ggaagacatcaaattctaaacctct

SEQ ID NO: 476167 - DNA, 25 bp, Artificial
  probe
  misc_feature (1)..(25): SEQ ID NO: 7732; WAN0249P2; Start 56; Stop 80
gaaataaagaggtttggaagacatc

SEQ ID NO: 476168 - DNA, 25 bp, Artificial
  probe
  misc_feature (1)..(25): SEQ ID NO: 7732; WAN0249P2; Start 58; Stop 82
aataaagaggtttggaagacatcaa

SEQ ID NO: 476169 - DNA, 25 bp, Artificial
  probe
  misc_feature (1)..(25): SEQ ID NO: 7732; WAN0249P2; Start 69; Stop 93
ttggaagacatcaaattctaaacct

SEQ ID NO: 476170 - DNA, 25 bp, Artificial
  probe
  misc_feature (1)..(25): SEQ ID NO: 7732; WAN0249P2; Start 29; Stop 53
cggttaaggcagcatctcattaaat

SEQ ID NO: 476171 - DNA, 25 bp, Artificial
  probe
  misc_feature (1)..(25): SEQ ID NO: 7732; WAN0249P2; Start 27; Stop 51
cacggttaaggcagcatctcattaa

SEQ ID NO: 476172 - DNA, 25 bp, Artificial
  probe
  misc_feature (1)..(25): SEQ ID NO: 7732; WAN0249P2; Start 126; Stop 150
tttgttacagagagccgattataaa

SEQ ID NO: 476173 - DNA, 25 bp, Artificial
  probe
  misc_feature (1)..(25): SEQ ID NO: 7732; WAN0249P2; Start 24; Stop 48
tatcacggttaaggcagcatctcat

SEQ ID NO: 476174 - DNA, 25 bp, Artificial
  probe
  misc_feature (1)..(25): SEQ ID NO: 7732; WAN0249P2; Start 127; Stop 151
ttgttacagagagccgattataaat

SEQ ID NO: 476175 - DNA, 25 bp, Artificial
  probe
  misc_feature (1)..(25): SEQ ID NO: 7732; WAN0249P2; Start 32; Stop 56
ttaaggcagcatctcattaaatatg

SEQ ID NO: 476176 - DNA, 25 bp, Artificial
  probe
  misc_feature (1)..(25): SEQ ID NO: 7732; WAN0249P2; Start 31; Stop 55
gttaaggcagcatctcattaaatat

SEQ ID NO: 476177 - DNA, 25 bp, Artificial
  probe
  misc_feature (1)..(25): SEQ ID NO: 7732; WAN0249P2; Start 26; Stop 50
tcacggttaaggcagcatctcatta

SEQ ID NO: 476178 - DNA, 25 bp, Artificial
  probe
  misc_feature (1)..(25): SEQ ID NO: 7732; WAN0249P2; Start 23; Stop 47
ttatcacggttaaggcagcatctca

SEQ ID NO: 476179 - DNA, 25 bp, Artificial
  probe
  misc_feature (1)..(25): SEQ ID NO: 7732; WAN0249P2; Start 53; Stop 77
tatgaaataaagaggtttggaagac

SEQ ID NO: 476180 - DNA, 25 bp, Artificial
  probe
  misc_feature (1)..(25): SEQ ID NO: 7732; WAN0249P2; Start 28; Stop 52
acggttaaggcagcatctcattaaa

SEQ ID NO: 476181 - DNA, 25 bp, Artificial
  probe
  misc_feature (1)..(25): SEQ ID NO: 7732; WAN0249P2; Start 128; Stop 152
tgttacagagagccgattataaata

SEQ ID NO: 476182 - DNA, 25 bp, Artificial
  probe
  misc_feature (1)..(25): SEQ ID NO: 7732; WAN0249P2; Start 63; Stop 87
agaggtttggaagacatcaaattct

SEQ ID NO: 476183 - DNA, 25 bp, Artificial
  probe
  misc_feature (1)..(25): SEQ ID NO: 7732; WAN0249P2; Start 62; Stop 86
aagaggtttggaagacatcaaattc

SEQ ID NO: 476184 - DNA, 25 bp, Artificial
  probe
  misc_feature (1)..(25): SEQ ID NO: 7732; WAN0249P2; Start 61; Stop 85
aaagaggtttggaagacatcaaatt

SEQ ID NO: 476185 - DNA, 25 bp, Artificial
  probe
  misc_feature (1)..(25): SEQ ID NO: 7733; WAN024AMP; Start 34; Stop 58
caagacgtttcgatgactattcaaa

SEQ ID NO: 476186 - DNA, 25 bp, Artificial
  probe
  misc_feature (1)..(25): SEQ ID NO: 7733; WAN024AMP; Start 29; Stop 53
caattcaagacgtttcgatgactat

SEQ ID NO: 476187 - DNA, 25 bp, Artificial
  probe
  misc_feature (1)..(25): SEQ ID NO: 7733; WAN024AMP; Start 31; Stop 55
attcaagacgtttcgatgactattc

SEQ ID NO: 476188 - DNA, 25 bp, Artificial
  probe
  misc_feature (1)..(25): SEQ ID NO: 7733; WAN024AMP; Start 33; Stop 57
tcaagacgtttcgatgactattcaa

SEQ ID NO: 476189 - DNA, 25 bp, Artificial
  probe
  misc_feature (1)..(25): SEQ ID NO: 7733; WAN024AMP; Start 32; Stop 56
ttcaagacgtttcgatgactattca

SEQ ID NO: 476190 - DNA, 25 bp, Artificial
  probe
  misc_feature (1)..(25): SEQ ID NO: 7733; WAN024AMP; Start 30; Stop 54
aattcaagacgtttcgatgactatt

SEQ ID NO: 476191 - DNA, 25 bp, Artificial
  probe
  misc_feature (1)..(25): SEQ ID NO: 7733; WAN024AMP; Start 28; Stop 52
gcaattcaagacgtttcgatgacta

SEQ ID NO: 476192 - DNA, 25 bp, Artificial
  probe
  misc_feature (1)..(25): SEQ ID NO: 7733; WAN024AMP; Start 44; Stop 68
cgatgactattcaaaatctggatga

SEQ ID NO: 476193 - DNA, 25 bp, Artificial
  probe
  misc_feature (1)..(25): SEQ ID NO: 7733; WAN024AMP; Start 82; Stop 106
acgatgatatactaaacttgtcaaa

SEQ ID NO: 476194 - DNA, 25 bp, Artificial
  probe
  misc_feature (1)..(25): SEQ ID NO: 7733; WAN024AMP; Start 81; Stop 105
aacgatgatatactaaacttgtcaa

SEQ ID NO: 476195 - DNA, 25 bp, Artificial
  probe
  misc_feature (1)..(25): SEQ ID NO: 7733; WAN024AMP; Start 80; Stop 104
aaacgatgatatactaaacttgtca

SEQ ID NO: 476196 - DNA, 25 bp, Artificial
  probe
  misc_feature (1)..(25): SEQ ID NO: 7733; WAN024AMP; Start 83; Stop 107
cgatgatatactaaacttgtcaaag

SEQ ID NO: 476197 - DNA, 25 bp, Artificial
  probe
  misc_feature (1)..(25): SEQ ID NO: 7733; WAN024AMP; Start 43; Stop 67
tcgatgactattcaaaatctggatg

SEQ ID NO: 476198 - DNA, 25 bp, Artificial
  probe
  misc_feature (1)..(25): SEQ ID NO: 7733; WAN024AMP; Start 39; Stop 63
cgtttcgatgactattcaaaatctg

SEQ ID NO: 476199 - DNA, 25 bp, Artificial
  probe
  misc_feature (1)..(25): SEQ ID NO: 7733; WAN024AMP; Start 35; Stop 59
aagacgtttcgatgactattcaaaa

SEQ ID NO: 476200 - DNA, 25 bp, Artificial
  probe
  misc_feature (1)..(25): SEQ ID NO: 7733; WAN024AMP; Start 40; Stop 64
gtttcgatgactattcaaaatctgg

SEQ ID NO: 476201 - DNA, 25 bp, Artificial
  probe
  misc_feature (1)..(25): SEQ ID NO: 7733; WAN024AMP; Start 38; Stop 62
acgtttcgatgactattcaaaatct

SEQ ID NO: 476202 - DNA, 25 bp, Artificial
  probe
  misc_feature (1)..(25): SEQ ID NO: 7733; WAN024AMP; Start 36; Stop 60
agacgtttcgatgactattcaaaat

SEQ ID NO: 476203 - DNA, 25 bp, Artificial
  probe
  misc_feature (1)..(25): SEQ ID NO: 7733; WAN024AMP; Start 41; Stop 65
tttcgatgactattcaaaatctgga

SEQ ID NO: 476204 - DNA, 25 bp, Artificial
  probe
  misc_feature (1)..(25): SEQ ID NO: 7733; WAN024AMP; Start 37; Stop 61
gacgtttcgatgactattcaaaatc

SEQ ID NO: 476205 - DNA, 25 bp, Artificial
  probe
  misc_feature (1)..(25): SEQ ID NO: 7733; WAN024AMP; Start 27; Stop 51
tgcaattcaagacgtttcgatgact

SEQ ID NO: 476206 - DNA, 25 bp, Artificial
  probe
  misc_feature (1)..(25): SEQ ID NO: 7733; WAN024AMP; Start 42; Stop 66
ttcgatgactattcaaaatctggat

SEQ ID NO: 476207 - DNA, 25 bp, Artificial
  probe
  misc_feature (1)..(25): SEQ ID NO: 7733; WAN024AMP; Start 2; Stop 26
tttgcaggaagtctaatgtaatttt

SEQ ID NO: 476208 - DNA, 25 bp, Artificial
  probe
  misc_feature (1)..(25): SEQ ID NO: 7733; WAN024AMP; Start 1; Stop 25
ttttgcaggaagtctaatgtaattt

SEQ ID NO: 476209 - DNA, 25 bp, Artificial
  probe
  misc_feature (1)..(25): SEQ ID NO: 7733; WAN024AMP; Start 25; Stop 49
tttgcaattcaagacgtttcgatga

SEQ ID NO: 476210 - DNA, 25 bp, Artificial
  probe
  misc_feature (1)..(25): SEQ ID NO: 7733; WAN024AMP; Start 26; Stop 50
ttgcaattcaagacgtttcgatgac

SEQ ID NO: 476211 - DNA, 25 bp, Artificial
  probe
  misc_feature (1)..(25): SEQ ID NO: 7733; WAN024AMP; Start 79; Stop 103
aaaacgatgatatactaaacttgtc

SEQ ID NO: 476212 - DNA, 25 bp, Artificial
  probe
  misc_feature (1)..(25): SEQ ID NO: 7733; WAN024AMP; Start 45; Stop 69
gatgactattcaaaatctggatgaa

SEQ ID NO: 476213 - DNA, 25 bp, Artificial
  probe
  misc_feature (1)..(25): SEQ ID NO: 7733; WAN024AMP; Start 47; Stop 71
tgactattcaaaatctggatgaaaa

SEQ ID NO: 476214 - DNA, 25 bp, Artificial
  probe
  misc_feature (1)..(25): SEQ ID NO: 7733; WAN024AMP; Start 46; Stop 70
atgactattcaaaatctggatgaaa

SEQ ID NO: 476215 - DNA, 25 bp, Artificial
  probe
  misc_feature (1)..(25): SEQ ID NO: 7733; WAN024AMP; Start 24; Stop 48
ttttgcaattcaagacgtttcgatg

SEQ ID NO: 476216 - DNA, 25 bp, Artificial
  probe
  misc_feature (1)..(25): SEQ ID NO: 7733; WAN024AMP; Start 92; Stop 116
actaaacttgtcaaagttacaacaa

SEQ ID NO: 476217 - DNA, 25 bp, Artificial
  probe
  misc_feature (1)..(25): SEQ ID NO: 7733; WAN024AMP; Start 91; Stop 115
tactaaacttgtcaaagttacaaca

SEQ ID NO: 476218 - DNA, 25 bp, Artificial
  probe
  misc_feature (1)..(25): SEQ ID NO: 7733; WAN024AMP; Start 90; Stop 114
atactaaacttgtcaaagttacaac

SEQ ID NO: 476219 - DNA, 25 bp, Artificial
  probe
  misc_feature (1)..(25): SEQ ID NO: 7734; WAN0249LD; Start 65; Stop 89
ttacatagagagacagcagttatga

SEQ ID NO: 476220 - DNA, 25 bp, Artificial
  probe
  misc_feature (1)..(25): SEQ ID NO: 7734; WAN0249LD; Start 67; Stop 91
acatagagagacagcagttatgata

SEQ ID NO: 476221 - DNA, 25 bp, Artificial
  probe
  misc_feature (1)..(25): SEQ ID NO: 7734; WAN0249LD; Start 66; Stop 90
tacatagagagacagcagttatgat

SEQ ID NO: 476222 - DNA, 25 bp, Artificial
  probe
  misc_feature (1)..(25): SEQ ID NO: 7734; WAN0249LD; Start 68; Stop 92
catagagagacagcagttatgatat

SEQ ID NO: 476223 - DNA, 25 bp, Artificial
  probe
  misc_feature (1)..(25): SEQ ID NO: 7734; WAN0249LD; Start 200; Stop 224
ttcccttcctatcaactagatcaac

SEQ ID NO: 476224 - DNA, 25 bp, Artificial
  probe
  misc_feature (1)..(25): SEQ ID NO: 7734; WAN0249LD; Start 199; Stop 223
attcccttcctatcaactagatcaa

SEQ ID NO: 476225 - DNA, 25 bp, Artificial
  probe
  misc_feature (1)..(25): SEQ ID NO: 7734; WAN0249LD; Start 198; Stop 222
aattcccttcctatcaactagatca

SEQ ID NO: 476226 - DNA, 25 bp, Artificial
  probe
  misc_feature (1)..(25): SEQ ID NO: 7734; WAN0249LD; Start 71; Stop 95
agagagacagcagttatgatatatt

SEQ ID NO: 476227 - DNA, 25 bp, Artificial
  probe
  misc_feature (1)..(25): SEQ ID NO: 7734; WAN0249LD; Start 69; Stop 93
atagagagacagcagttatgatata

SEQ ID NO: 476228 - DNA, 25 bp, Artificial
  probe
  misc_feature (1)..(25): SEQ ID NO: 7734; WAN0249LD; Start 195; Stop 219
agtaattcccttcctatcaactaga

SEQ ID NO: 476229 - DNA, 25 bp, Artificial
  probe
  misc_feature (1)..(25): SEQ ID NO: 7734; WAN0249LD; Start 64; Stop 88
tttacatagagagacagcagttatg

SEQ ID NO: 476230 - DNA, 25 bp, Artificial
  probe
  misc_feature (1)..(25): SEQ ID NO: 7734; WAN0249LD; Start 196; Stop 220
gtaattcccttcctatcaactagat

SEQ ID NO: 476231 - DNA, 25 bp, Artificial
  probe
  misc_feature (1)..(25): SEQ ID NO: 7734; WAN0249LD; Start 70; Stop 94
tagagagacagcagttatgatatat

SEQ ID NO: 476232 - DNA, 25 bp, Artificial
  probe
  misc_feature (1)..(25): SEQ ID NO: 7734; WAN0249LD; Start 197; Stop 221
taattcccttcctatcaactagatc

SEQ ID NO: 476233 - DNA, 25 bp, Artificial
  probe
  misc_feature (1)..(25): SEQ ID NO: 7734; WAN0249LD; Start 252; Stop 276
ctagcctcagcaaaggactatgatc

SEQ ID NO: 476234 - DNA, 25 bp, Artificial
  probe
  misc_feature (1)..(25): SEQ ID NO: 7734; WAN0249LD; Start 72; Stop 96
gagagacagcagttatgatatattt

SEQ ID NO: 476235 - DNA, 25 bp, Artificial
  probe
  misc_feature (1)..(25): SEQ ID NO: 7734; WAN0249LD; Start 63; Stop 87
ttttacatagagagacagcagttat

SEQ ID NO: 476236 - DNA, 25 bp, Artificial
  probe
  misc_feature (1)..(25): SEQ ID NO: 7734; WAN0249LD; Start 194; Stop 218
tagtaattcccttcctatcaactag

SEQ ID NO: 476237 - DNA, 25 bp, Artificial
  probe
  misc_feature (1)..(25): SEQ ID NO: 7734; WAN0249LD; Start 192; Stop 216
tatagtaattcccttcctatcaact

SEQ ID NO: 476238 - DNA, 25 bp, Artificial
  probe
  misc_feature (1)..(25): SEQ ID NO: 7734; WAN0249LD; Start 260; Stop 284
agcaaaggactatgatcagcatttc

SEQ ID NO: 476239 - DNA, 25 bp, Artificial
  probe
  misc_feature (1)..(25): SEQ ID NO: 7734; WAN0249LD; Start 251; Stop 275
cctagcctcagcaaaggactatgat

SEQ ID NO: 476240 - DNA, 25 bp, Artificial
  probe
  misc_feature (1)..(25): SEQ ID NO: 7734; WAN0249LD; Start 259; Stop 283
cagcaaaggactatgatcagcattt

SEQ ID NO: 476241 - DNA, 25 bp, Artificial
  probe
  misc_feature (1)..(25): SEQ ID NO: 7734; WAN0249LD; Start 267; Stop 291
gactatgatcagcatttcctagcca

SEQ ID NO: 476242 - DNA, 25 bp, Artificial
  probe
  misc_feature (1)..(25): SEQ ID NO: 7734; WAN0249LD; Start 193; Stop 217
atagtaattcccttcctatcaacta

SEQ ID NO: 476243 - DNA, 25 bp, Artificial
  probe
  misc_feature (1)..(25): SEQ ID NO: 7734; WAN0249LD; Start 258; Stop 282
tcagcaaaggactatgatcagcatt

SEQ ID NO: 476244 - DNA, 25 bp, Artificial
  probe
  misc_feature (1)..(25): SEQ ID NO: 7734; WAN0249LD; Start 191; Stop 215
ttatagtaattcccttcctatcaac

SEQ ID NO: 476245 - DNA, 25 bp, Artificial
  probe
  misc_feature (1)..(25): SEQ ID NO: 7734; WAN0249LD; Start 257; Stop 281
ctcagcaaaggactatgatcagcat

SEQ ID NO: 476246 - DNA, 25 bp, Artificial
  probe
  misc_feature (1)..(25): SEQ ID NO: 7734; WAN0249LD; Start 261; Stop 285
gcaaaggactatgatcagcatttcc

SEQ ID NO: 476247 - DNA, 25 bp, Artificial
  probe
  misc_feature (1)..(25): SEQ ID NO: 7734; WAN0249LD; Start 111; Stop 135
tcttctgtaccaatactacaataat

SEQ ID NO: 476248 - DNA, 25 bp, Artificial
  probe
  misc_feature (1)..(25): SEQ ID NO: 7734; WAN0249LD; Start 110; Stop 134
atcttctgtaccaatactacaataa

SEQ ID NO: 476249 - DNA, 25 bp, Artificial
  probe
  misc_feature (1)..(25): SEQ ID NO: 7734; WAN0249LD; Start 77; Stop 101
acagcagttatgatatatttatcca

SEQ ID NO: 476250 - DNA, 25 bp, Artificial
  probe
  misc_feature (1)..(25): SEQ ID NO: 7734; WAN0249LD; Start 167; Stop 191
aaatatgatggaagactgagtattt

SEQ ID NO: 476251 - DNA, 25 bp, Artificial
  probe
  misc_feature (1)..(25): SEQ ID NO: 7734; WAN0249LD; Start 73; Stop 97
agagacagcagttatgatatattta

SEQ ID NO: 476252 - DNA, 25 bp, Artificial
  probe
  misc_feature (1)..(25): SEQ ID NO: 7735; WAN0249LC; Start 173; Stop 197
ctcccttcctatcaactagatcaac

SEQ ID NO: 476253 - DNA, 25 bp, Artificial
  probe
  misc_feature (1)..(25): SEQ ID NO: 7735; WAN0249LC; Start 172; Stop 196
actcccttcctatcaactagatcaa

SEQ ID NO: 476254 - DNA, 25 bp, Artificial
  probe
  misc_feature (1)..(25): SEQ ID NO: 7735; WAN0249LC; Start 171; Stop 195
aactcccttcctatcaactagatca

SEQ ID NO: 476255 - DNA, 25 bp, Artificial
  probe
  misc_feature (1)..(25): SEQ ID NO: 7735; WAN0249LC; Start 169; Stop 193
gtaactcccttcctatcaactagat

SEQ ID NO: 476256 - DNA, 25 bp, Artificial
  probe
  misc_feature (1)..(25): SEQ ID NO: 7735; WAN0249LC; Start 168; Stop 192
agtaactcccttcctatcaactaga

SEQ ID NO: 476257 - DNA, 25 bp, Artificial
  probe
  misc_feature (1)..(25): SEQ ID NO: 7735; WAN0249LC; Start 170; Stop 194
taactcccttcctatcaactagatc

SEQ ID NO: 476258 - DNA, 25 bp, Artificial
  probe
  misc_feature (1)..(25): SEQ ID NO: 7735; WAN0249LC; Start 165; Stop 189
tatagtaactcccttcctatcaact

SEQ ID NO: 476259 - DNA, 25 bp, Artificial
  probe
  misc_feature (1)..(25): SEQ ID NO: 7735; WAN0249LC; Start 167; Stop 191
tagtaactcccttcctatcaactag

SEQ ID NO: 476260 - DNA, 25 bp, Artificial
  probe
  misc_feature (1)..(25): SEQ ID NO: 7735; WAN0249LC; Start 6; Stop 30
caggaagtctattatatatgcacag

SEQ ID NO: 476261 - DNA, 25 bp, Artificial
  probe
  misc_feature (1)..(25): SEQ ID NO: 7735; WAN0249LC; Start 164; Stop 188
ttatagtaactcccttcctatcaac

SEQ ID NO: 476262 - DNA, 25 bp, Artificial
  probe
  misc_feature (1)..(25): SEQ ID NO: 7735; WAN0249LC; Start 166; Stop 190
atagtaactcccttcctatcaacta

SEQ ID NO: 476263 - DNA, 25 bp, Artificial
  probe
  misc_feature (1)..(25): SEQ ID NO: 7735; WAN0249LC; Start 7; Stop 31
aggaagtctattatatatgcacaga

SEQ ID NO: 476264 - DNA, 25 bp, Artificial
  probe
  misc_feature (1)..(25): SEQ ID NO: 7735; WAN0249LC; Start 5; Stop 29
gcaggaagtctattatatatgcaca

SEQ ID NO: 476265 - DNA, 25 bp, Artificial
  probe
  misc_feature (1)..(25): SEQ ID NO: 7735; WAN0249LC; Start 140; Stop 164
aaatatgatggaagcctgagtattt

SEQ ID NO: 476266 - DNA, 25 bp, Artificial
  probe
  misc_feature (1)..(25): SEQ ID NO: 7735; WAN0249LC; Start 233; Stop 257
agcaaaggactatgagcagcatttc

SEQ ID NO: 476267 - DNA, 25 bp, Artificial
  probe
  misc_feature (1)..(25): SEQ ID NO: 7735; WAN0249LC; Start 146; Stop 170
gatggaagcctgagtattttatagt

SEQ ID NO: 476268 - DNA, 25 bp, Artificial
  probe
  misc_feature (1)..(25): SEQ ID NO: 7735; WAN0249LC; Start 145; Stop 169
tgatggaagcctgagtattttatag

SEQ ID NO: 476269 - DNA, 25 bp, Artificial
  probe
  misc_feature (1)..(25): SEQ ID NO: 7735; WAN0249LC; Start 141; Stop 165
aatatgatggaagcctgagtatttt

SEQ ID NO: 476270 - DNA, 25 bp, Artificial
  probe
  misc_feature (1)..(25): SEQ ID NO: 7735; WAN0249LC; Start 139; Stop 163
aaaatatgatggaagcctgagtatt

SEQ ID NO: 476271 - DNA, 25 bp, Artificial
  probe
  misc_feature (1)..(25): SEQ ID NO: 7735; WAN0249LC; Start 232; Stop 256
cagcaaaggactatgagcagcattt

SEQ ID NO: 476272 - DNA, 25 bp, Artificial
  probe
  misc_feature (1)..(25): SEQ ID NO: 7735; WAN0249LC; Start 163; Stop 187
tttatagtaactcccttcctatcaa

SEQ ID NO: 476273 - DNA, 25 bp, Artificial
  probe
  misc_feature (1)..(25): SEQ ID NO: 7735; WAN0249LC; Start 143; Stop 167
tatgatggaagcctgagtattttat

SEQ ID NO: 476274 - DNA, 25 bp, Artificial
  probe
  misc_feature (1)..(25): SEQ ID NO: 7735; WAN0249LC; Start 144; Stop 168
atgatggaagcctgagtattttata

SEQ ID NO: 476275 - DNA, 25 bp, Artificial
  probe
  misc_feature (1)..(25): SEQ ID NO: 7735; WAN0249LC; Start 142; Stop 166
atatgatggaagcctgagtatttta

SEQ ID NO: 476276 - DNA, 25 bp, Artificial
  probe
  misc_feature (1)..(25): SEQ ID NO: 7735; WAN0249LC; Start 148; Stop 172
tggaagcctgagtattttatagtaa

SEQ ID NO: 476277 - DNA, 25 bp, Artificial
  probe
  misc_feature (1)..(25): SEQ ID NO: 7735; WAN0249LC; Start 149; Stop 173
ggaagcctgagtattttatagtaac

SEQ ID NO: 476278 - DNA, 25 bp, Artificial
  probe
  misc_feature (1)..(25): SEQ ID NO: 7735; WAN0249LC; Start 147; Stop 171
atggaagcctgagtattttatagta

SEQ ID NO: 476279 - DNA, 25 bp, Artificial
  probe
  misc_feature (1)..(25): SEQ ID NO: 7735; WAN0249LC; Start 231; Stop 255
tcagcaaaggactatgagcagcatt

SEQ ID NO: 476280 - DNA, 25 bp, Artificial
  probe
  misc_feature (1)..(25): SEQ ID NO: 7735; WAN0249LC; Start 236; Stop 260
aaaggactatgagcagcatttccta

SEQ ID NO: 476281 - DNA, 25 bp, Artificial
  probe
  misc_feature (1)..(25): SEQ ID NO: 7735; WAN0249LC; Start 234; Stop 258
gcaaaggactatgagcagcatttcc

SEQ ID NO: 476282 - DNA, 25 bp, Artificial
  probe
  misc_feature (1)..(25): SEQ ID NO: 7735; WAN0249LC; Start 8; Stop 32
ggaagtctattatatatgcacagac

SEQ ID NO: 476283 - DNA, 25 bp, Artificial
  probe
  misc_feature (1)..(25): SEQ ID NO: 7735; WAN0249LC; Start 237; Stop 261
aaggactatgagcagcatttcctag

SEQ ID NO: 476284 - DNA, 25 bp, Artificial
  probe
  misc_feature (1)..(25): SEQ ID NO: 7735; WAN0249LC; Start 158; Stop 182
agtattttatagtaactcccttcct

SEQ ID NO: 476285 - DNA, 25 bp, Artificial
  probe
  misc_feature (1)..(25): SEQ ID NO: 7736; WAN024AF9; Start 226; Stop 250
ttgtagttagtcttccagtttgcta

SEQ ID NO: 476286 - DNA, 25 bp, Artificial
  probe
  misc_feature (1)..(25): SEQ ID NO: 7736; WAN024AF9; Start 156; Stop 180
tcatcttaggtatgtgttaattgga

SEQ ID NO: 476287 - DNA, 25 bp, Artificial
  probe
  misc_feature (1)..(25): SEQ ID NO: 7736; WAN024AF9; Start 225; Stop 249
gttgtagttagtcttccagtttgct

SEQ ID NO: 476288 - DNA, 25 bp, Artificial
  probe
  misc_feature (1)..(25): SEQ ID NO: 7736; WAN024AF9; Start 224; Stop 248
agttgtagttagtcttccagtttgc

SEQ ID NO: 476289 - DNA, 25 bp, Artificial
  probe
  misc_feature (1)..(25): SEQ ID NO: 7736; WAN024AF9; Start 153; Stop 177
gcttcatcttaggtatgtgttaatt

SEQ ID NO: 476290 - DNA, 25 bp, Artificial
  probe
  misc_feature (1)..(25): SEQ ID NO: 7736; WAN024AF9; Start 149; Stop 173
gatagcttcatcttaggtatgtgtt

SEQ ID NO: 476291 - DNA, 25 bp, Artificial
  probe
  misc_feature (1)..(25): SEQ ID NO: 7736; WAN024AF9; Start 223; Stop 247
aagttgtagttagtcttccagtttg

SEQ ID NO: 476292 - DNA, 25 bp, Artificial
  probe
  misc_feature (1)..(25): SEQ ID NO: 7736; WAN024AF9; Start 152; Stop 176
agcttcatcttaggtatgtgttaat

SEQ ID NO: 476293 - DNA, 25 bp, Artificial
  probe
  misc_feature (1)..(25): SEQ ID NO: 7736; WAN024AF9; Start 163; Stop 187
aggtatgtgttaattggatttcgta

SEQ ID NO: 476294 - DNA, 25 bp, Artificial
  probe
  misc_feature (1)..(25): SEQ ID NO: 7736; WAN024AF9; Start 162; Stop 186
taggtatgtgttaattggatttcgt

SEQ ID NO: 476295 - DNA, 25 bp, Artificial
  probe
  misc_feature (1)..(25): SEQ ID NO: 7736; WAN024AF9; Start 222; Stop 246
aaagttgtagttagtcttccagttt

SEQ ID NO: 476296 - DNA, 25 bp, Artificial
  probe
  misc_feature (1)..(25): SEQ ID NO: 7736; WAN024AF9; Start 155; Stop 179
ttcatcttaggtatgtgttaattgg

SEQ ID NO: 476297 - DNA, 25 bp, Artificial
  probe
  misc_feature (1)..(25): SEQ ID NO: 7736; WAN024AF9; Start 227; Stop 251
tgtagttagtcttccagtttgctaa

SEQ ID NO: 476298 - DNA, 25 bp, Artificial
  probe
  misc_feature (1)..(25): SEQ ID NO: 7736; WAN024AF9; Start 166; Stop 190
tatgtgttaattggatttcgtaagc

SEQ ID NO: 476299 - DNA, 25 bp, Artificial
  probe
  misc_feature (1)..(25): SEQ ID NO: 7736; WAN024AF9; Start 157; Stop 181
catcttaggtatgtgttaattggat

SEQ ID NO: 476300 - DNA, 25 bp, Artificial
  probe
  misc_feature (1)..(25): SEQ ID NO: 7736; WAN024AF9; Start 228; Stop 252
gtagttagtcttccagtttgctaaa

SEQ ID NO: 476301 - DNA, 25 bp, Artificial
  probe
  misc_feature (1)..(25): SEQ ID NO: 7736; WAN024AF9; Start 168; Stop 192
tgtgttaattggatttcgtaagctc

SEQ ID NO: 476302 - DNA, 25 bp, Artificial
  probe
  misc_feature (1)..(25): SEQ ID NO: 7736; WAN024AF9; Start 169; Stop 193
gtgttaattggatttcgtaagctct

SEQ ID NO: 476303 - DNA, 25 bp, Artificial
  probe
  misc_feature (1)..(25): SEQ ID NO: 7736; WAN024AF9; Start 164; Stop 188
ggtatgtgttaattggatttcgtaa

SEQ ID NO: 476304 - DNA, 25 bp, Artificial
  probe
  misc_feature (1)..(25): SEQ ID NO: 7736; WAN024AF9; Start 230; Stop 254
agttagtcttccagtttgctaaatt

SEQ ID NO: 476305 - DNA, 25 bp, Artificial
  probe
  misc_feature (1)..(25): SEQ ID NO: 7736; WAN024AF9; Start 167; Stop 191
atgtgttaattggatttcgtaagct

SEQ ID NO: 476306 - DNA, 25 bp, Artificial
  probe
  misc_feature (1)..(25): SEQ ID NO: 7736; WAN024AF9; Start 151; Stop 175
tagcttcatcttaggtatgtgttaa

SEQ ID NO: 476307 - DNA, 25 bp, Artificial
  probe
  misc_feature (1)..(25): SEQ ID NO: 7736; WAN024AF9; Start 148; Stop 172
agatagcttcatcttaggtatgtgt

SEQ ID NO: 476308 - DNA, 25 bp, Artificial
  probe
  misc_feature (1)..(25): SEQ ID NO: 7736; WAN024AF9; Start 234; Stop 258
agtcttccagtttgctaaatttctc

SEQ ID NO: 476309 - DNA, 25 bp, Artificial
  probe
  misc_feature (1)..(25): SEQ ID NO: 7736; WAN024AF9; Start 161; Stop 185
ttaggtatgtgttaattggatttcg

SEQ ID NO: 476310 - DNA, 25 bp, Artificial
  probe
  misc_feature (1)..(25): SEQ ID NO: 7736; WAN024AF9; Start 236; Stop 260
tcttccagtttgctaaatttctcga

SEQ ID NO: 476311 - DNA, 25 bp, Artificial
  probe
  misc_feature (1)..(25): SEQ ID NO: 7736; WAN024AF9; Start 235; Stop 259
gtcttccagtttgctaaatttctcg

SEQ ID NO: 476312 - DNA, 25 bp, Artificial
  probe
  misc_feature (1)..(25): SEQ ID NO: 7736; WAN024AF9; Start 150; Stop 174
atagcttcatcttaggtatgtgtta

SEQ ID NO: 476313 - DNA, 25 bp, Artificial
  probe
  misc_feature (1)..(25): SEQ ID NO: 7736; WAN024AF9; Start 237; Stop 261
cttccagtttgctaaatttctcgaa

SEQ ID NO: 476314 - DNA, 25 bp, Artificial
  probe
  misc_feature (1)..(25): SEQ ID NO: 7736; WAN024AF9; Start 238; Stop 262
ttccagtttgctaaatttctcgaat

SEQ ID NO: 476315 - DNA, 25 bp, Artificial
  probe
  misc_feature (1)..(25): SEQ ID NO: 7736; WAN024AF9; Start 239; Stop 263
tccagtttgctaaatttctcgaata

SEQ ID NO: 476316 - DNA, 25 bp, Artificial
  probe
  misc_feature (1)..(25): SEQ ID NO: 7736; WAN024AF9; Start 229; Stop 253
tagttagtcttccagtttgctaaat

SEQ ID NO: 476317 - DNA, 25 bp, Artificial
  probe
  misc_feature (1)..(25): SEQ ID NO: 7736; WAN024AF9; Start 170; Stop 194
tgttaattggatttcgtaagctcta

SEQ ID NO: 476318 - DNA, 25 bp, Artificial
  probe
  misc_feature (1)..(25): SEQ ID NO: 7737; WAN024AFA; Start 153; Stop 177
gcttcatcttaggtatgtgatttct

SEQ ID NO: 476319 - DNA, 25 bp, Artificial
  probe
  misc_feature (1)..(25): SEQ ID NO: 7737; WAN024AFA; Start 149; Stop 173
gatagcttcatcttaggtatgtgat

SEQ ID NO: 476320 - DNA, 25 bp, Artificial
  probe
  misc_feature (1)..(25): SEQ ID NO: 7737; WAN024AFA; Start 150; Stop 174
atagcttcatcttaggtatgtgatt

SEQ ID NO: 476321 - DNA, 25 bp, Artificial
  probe
  misc_feature (1)..(25): SEQ ID NO: 7737; WAN024AFA; Start 148; Stop 172
agatagcttcatcttaggtatgtga

SEQ ID NO: 476322 - DNA, 25 bp, Artificial
  probe
  misc_feature (1)..(25): SEQ ID NO: 7737; WAN024AFA; Start 152; Stop 176
agcttcatcttaggtatgtgatttc

SEQ ID NO: 476323 - DNA, 25 bp, Artificial
  probe
  misc_feature (1)..(25): SEQ ID NO: 7737; WAN024AFA; Start 154; Stop 178
cttcatcttaggtatgtgatttctt

SEQ ID NO: 476324 - DNA, 25 bp, Artificial
  probe
  misc_feature (1)..(25): SEQ ID NO: 7737; WAN024AFA; Start 151; Stop 175
tagcttcatcttaggtatgtgattt

SEQ ID NO: 476325 - DNA, 25 bp, Artificial
  probe
  misc_feature (1)..(25): SEQ ID NO: 7737; WAN024AFA; Start 69; Stop 93
tgaattgaaataaagagagtacgaa

SEQ ID NO: 476326 - DNA, 25 bp, Artificial
  probe
  misc_feature (1)..(25): SEQ ID NO: 7737; WAN024AFA; Start 68; Stop 92
atgaattgaaataaagagagtacga

SEQ ID NO: 476327 - DNA, 25 bp, Artificial
  probe
  misc_feature (1)..(25): SEQ ID NO: 7737; WAN024AFA; Start 155; Stop 179
ttcatcttaggtatgtgatttcttt

SEQ ID NO: 476328 - DNA, 25 bp, Artificial
  probe
  misc_feature (1)..(25): SEQ ID NO: 7737; WAN024AFA; Start 67; Stop 91
aatgaattgaaataaagagagtacg

SEQ ID NO: 476329 - DNA, 25 bp, Artificial
  probe
  misc_feature (1)..(25): SEQ ID NO: 7737; WAN024AFA; Start 70; Stop 94
gaattgaaataaagagagtacgaaa

SEQ ID NO: 476330 - DNA, 25 bp, Artificial
  probe
  misc_feature (1)..(25): SEQ ID NO: 7737; WAN024AFA; Start 156; Stop 180
tcatcttaggtatgtgatttctttt

SEQ ID NO: 476331 - DNA, 25 bp, Artificial
  probe
  misc_feature (1)..(25): SEQ ID NO: 7737; WAN024AFA; Start 74; Stop 98
tgaaataaagagagtacgaaaattc

SEQ ID NO: 476332 - DNA, 25 bp, Artificial
  probe
  misc_feature (1)..(25): SEQ ID NO: 7737; WAN024AFA; Start 75; Stop 99
gaaataaagagagtacgaaaattct

SEQ ID NO: 476333 - DNA, 25 bp, Artificial
  probe
  misc_feature (1)..(25): SEQ ID NO: 7737; WAN024AFA; Start 73; Stop 97
ttgaaataaagagagtacgaaaatt

SEQ ID NO: 476334 - DNA, 25 bp, Artificial
  probe
  misc_feature (1)..(25): SEQ ID NO: 7737; WAN024AFA; Start 71; Stop 95
aattgaaataaagagagtacgaaaa

SEQ ID NO: 476335 - DNA, 25 bp, Artificial
  probe
  misc_feature (1)..(25): SEQ ID NO: 7737; WAN024AFA; Start 64; Stop 88
tcaaatgaattgaaataaagagagt

SEQ ID NO: 476336 - DNA, 25 bp, Artificial
  probe
  misc_feature (1)..(25): SEQ ID NO: 7737; WAN024AFA; Start 62; Stop 86
actcaaatgaattgaaataaagaga

SEQ ID NO: 476337 - DNA, 25 bp, Artificial
  probe
  misc_feature (1)..(25): SEQ ID NO: 7737; WAN024AFA; Start 72; Stop 96
attgaaataaagagagtacgaaaat

SEQ ID NO: 476338 - DNA, 25 bp, Artificial
  probe
  misc_feature (1)..(25): SEQ ID NO: 7738; WAN02472B; Start 6; Stop 30
aaagttatctgtatcaaatgctgcc

SEQ ID NO: 476339 - DNA, 25 bp, Artificial
  probe
  misc_feature (1)..(25): SEQ ID NO: 7738; WAN02472B; Start 8; Stop 32
agttatctgtatcaaatgctgcctt

SEQ ID NO: 476340 - DNA, 25 bp, Artificial
  probe
  misc_feature (1)..(25): SEQ ID NO: 7738; WAN02472B; Start 7; Stop 31
aagttatctgtatcaaatgctgcct

SEQ ID NO: 476341 - DNA, 25 bp, Artificial
  probe
  misc_feature (1)..(25): SEQ ID NO: 7738; WAN02472B; Start 5; Stop 29
gaaagttatctgtatcaaatgctgc

SEQ ID NO: 476342 - DNA, 25 bp, Artificial
  probe
  misc_feature (1)..(25): SEQ ID NO: 7738; WAN02472B; Start 9; Stop 33
gttatctgtatcaaatgctgccttg

SEQ ID NO: 476343 - DNA, 25 bp, Artificial
  probe
  misc_feature (1)..(25): SEQ ID NO: 7738; WAN02472B; Start 4; Stop 28
agaaagttatctgtatcaaatgctg

SEQ ID NO: 476344 - DNA, 25 bp, Artificial
  probe
  misc_feature (1)..(25): SEQ ID NO: 7738; WAN02472B; Start 2; Stop 26
tgagaaagttatctgtatcaaatgc

SEQ ID NO: 476345 - DNA, 25 bp, Artificial
  probe
  misc_feature (1)..(25): SEQ ID NO: 7738; WAN02472B; Start 3; Stop 27
gagaaagttatctgtatcaaatgct

SEQ ID NO: 476346 - DNA, 25 bp, Artificial
  probe
  misc_feature (1)..(25): SEQ ID NO: 7738; WAN02472B; Start 10; Stop 34
ttatctgtatcaaatgctgccttga

SEQ ID NO: 476347 - DNA, 25 bp, Artificial
  probe
  misc_feature (1)..(25): SEQ ID NO: 7738; WAN02472B; Start 1; Stop 25
atgagaaagttatctgtatcaaatg

SEQ ID NO: 476348 - DNA, 25 bp, Artificial
  probe
  misc_feature (1)..(25): SEQ ID NO: 7738; WAN02472B; Start 11; Stop 35
tatctgtatcaaatgctgccttgat

SEQ ID NO: 476349 - DNA, 25 bp, Artificial
  probe
  misc_feature (1)..(25): SEQ ID NO: 7738; WAN02472B; Start 55; Stop 79
gccatgtttgctcctccatcatttt

SEQ ID NO: 476350 - DNA, 25 bp, Artificial
  probe
  misc_feature (1)..(25): SEQ ID NO: 7738; WAN02472B; Start 77; Stop 101
ttttctttgtaaactgttttctttt

SEQ ID NO: 476351 - DNA, 25 bp, Artificial
  probe
  misc_feature (1)..(25): SEQ ID NO: 7739; WAN02472C; Start 45; Stop 69
aaatggagattatttcagctatttt

SEQ ID NO: 476352 - DNA, 25 bp, Artificial
  probe
  misc_feature (1)..(25): SEQ ID NO: 7739; WAN02472C; Start 44; Stop 68
aaaatggagattatttcagctattt

SEQ ID NO: 476353 - DNA, 25 bp, Artificial
  probe
  misc_feature (1)..(25): SEQ ID NO: 7740; WAN02472D; Start 7; Stop 31
aagccattatttcaaatcctccaaa

SEQ ID NO: 476354 - DNA, 25 bp, Artificial
  probe
  misc_feature (1)..(25): SEQ ID NO: 7740; WAN02472D; Start 6; Stop 30
aaagccattatttcaaatcctccaa

SEQ ID NO: 476355 - DNA, 25 bp, Artificial
  probe
  misc_feature (1)..(25): SEQ ID NO: 7740; WAN02472D; Start 54; Stop 78
ctttacccatgacagcaatttcttc

SEQ ID NO: 476356 - DNA, 25 bp, Artificial
  probe
  misc_feature (1)..(25): SEQ ID NO: 7740; WAN02472D; Start 76; Stop 100
ttcctcgctcatgccatcaataatt

SEQ ID NO: 476357 - DNA, 25 bp, Artificial
  probe
  misc_feature (1)..(25): SEQ ID NO: 7740; WAN02472D; Start 128; Stop 152
ttatgcagtctatgaatcaagcgac

SEQ ID NO: 476358 - DNA, 25 bp, Artificial
  probe
  misc_feature (1)..(25): SEQ ID NO: 7740; WAN02472D; Start 40; Stop 64
aagattagtcaaacctttacccatg

SEQ ID NO: 476359 - DNA, 25 bp, Artificial
  probe
  misc_feature (1)..(25): SEQ ID NO: 7740; WAN02472D; Start 136; Stop 160
tctatgaatcaagcgacccttcttt

SEQ ID NO: 476360 - DNA, 25 bp, Artificial
  probe
  misc_feature (1)..(25): SEQ ID NO: 7740; WAN02472D; Start 41; Stop 65
agattagtcaaacctttacccatga

SEQ ID NO: 476361 - DNA, 25 bp, Artificial
  probe
  misc_feature (1)..(25): SEQ ID NO: 7740; WAN02472D; Start 137; Stop 161
ctatgaatcaagcgacccttctttg

SEQ ID NO: 476362 - DNA, 25 bp, Artificial
  probe
  misc_feature (1)..(25): SEQ ID NO: 7740; WAN02472D; Start 75; Stop 99
cttcctcgctcatgccatcaataat

SEQ ID NO: 476363 - DNA, 25 bp, Artificial
  probe
  misc_feature (1)..(25): SEQ ID NO: 7740; WAN02472D; Start 50; Stop 74
aaacctttacccatgacagcaattt

SEQ ID NO: 476364 - DNA, 25 bp, Artificial
  probe
  misc_feature (1)..(25): SEQ ID NO: 7740; WAN02472D; Start 55; Stop 79
tttacccatgacagcaatttcttcc

SEQ ID NO: 476365 - DNA, 25 bp, Artificial
  probe
  misc_feature (1)..(25): SEQ ID NO: 7740; WAN02472D; Start 53; Stop 77
cctttacccatgacagcaatttctt

SEQ ID NO: 476366 - DNA, 25 bp, Artificial
  probe
  misc_feature (1)..(25): SEQ ID NO: 7740; WAN02472D; Start 51; Stop 75
aacctttacccatgacagcaatttc

SEQ ID NO: 476367 - DNA, 25 bp, Artificial
  probe
  misc_feature (1)..(25): SEQ ID NO: 7740; WAN02472D; Start 121; Stop 145
gaagcgtttatgcagtctatgaatc

SEQ ID NO: 476368 - DNA, 25 bp, Artificial
  probe
  misc_feature (1)..(25): SEQ ID NO: 7740; WAN02472D; Start 126; Stop 150
gtttatgcagtctatgaatcaagcg

SEQ ID NO: 476369 - DNA, 25 bp, Artificial
  probe
  misc_feature (1)..(25): SEQ ID NO: 7740; WAN02472D; Start 125; Stop 149
cgtttatgcagtctatgaatcaagc

SEQ ID NO: 476370 - DNA, 25 bp, Artificial
  probe
  misc_feature (1)..(25): SEQ ID NO: 7740; WAN02472D; Start 124; Stop 148
gcgtttatgcagtctatgaatcaag

SEQ ID NO: 476371 - DNA, 25 bp, Artificial
  probe
  misc_feature (1)..(25): SEQ ID NO: 7740; WAN02472D; Start 138; Stop 162
tatgaatcaagcgacccttctttgt

SEQ ID NO: 476372 - DNA, 25 bp, Artificial
  probe
  misc_feature (1)..(25): SEQ ID NO: 7740; WAN02472D; Start 127; Stop 151
tttatgcagtctatgaatcaagcga

SEQ ID NO: 476373 - DNA, 25 bp, Artificial
  probe
  misc_feature (1)..(25): SEQ ID NO: 7740; WAN02472D; Start 49; Stop 73
caaacctttacccatgacagcaatt

SEQ ID NO: 476374 - DNA, 25 bp, Artificial
  probe
  misc_feature (1)..(25): SEQ ID NO: 7740; WAN02472D; Start 123; Stop 147
agcgtttatgcagtctatgaatcaa

SEQ ID NO: 476375 - DNA, 25 bp, Artificial
  probe
  misc_feature (1)..(25): SEQ ID NO: 7740; WAN02472D; Start 122; Stop 146
aagcgtttatgcagtctatgaatca

SEQ ID NO: 476376 - DNA, 25 bp, Artificial
  probe
  misc_feature (1)..(25): SEQ ID NO: 7740; WAN02472D; Start 56; Stop 80
ttacccatgacagcaatttcttcct

SEQ ID NO: 476377 - DNA, 25 bp, Artificial
  probe
  misc_feature (1)..(25): SEQ ID NO: 7740; WAN02472D; Start 120; Stop 144
ggaagcgtttatgcagtctatgaat

SEQ ID NO: 476378 - DNA, 25 bp, Artificial
  probe
  misc_feature (1)..(25): SEQ ID NO: 7740; WAN02472D; Start 52; Stop 76
acctttacccatgacagcaatttct

SEQ ID NO: 476379 - DNA, 25 bp, Artificial
  probe
  misc_feature (1)..(25): SEQ ID NO: 7740; WAN02472D; Start 129; Stop 153
tatgcagtctatgaatcaagcgacc

SEQ ID NO: 476380 - DNA, 25 bp, Artificial
  probe
  misc_feature (1)..(25): SEQ ID NO: 7740; WAN02472D; Start 57; Stop 81
tacccatgacagcaatttcttcctc

SEQ ID NO: 476381 - DNA, 25 bp, Artificial
  probe
  misc_feature (1)..(25): SEQ ID NO: 7740; WAN02472D; Start 135; Stop 159
gtctatgaatcaagcgacccttctt

SEQ ID NO: 476382 - DNA, 25 bp, Artificial
  probe
  misc_feature (1)..(25): SEQ ID NO: 7740; WAN02472D; Start 77; Stop 101
tcctcgctcatgccatcaataattt

SEQ ID NO: 476383 - DNA, 25 bp, Artificial
  probe
  misc_feature (1)..(25): SEQ ID NO: 7740; WAN02472D; Start 39; Stop 63
aaagattagtcaaacctttacccat

SEQ ID NO: 476384 - DNA, 25 bp, Artificial
  probe
  misc_feature (1)..(25): SEQ ID NO: 7740; WAN02472D; Start 3; Stop 27
gcaaaagccattatttcaaatcctc

SEQ ID NO: 476385 - DNA, 25 bp, Artificial
  probe
  misc_feature (1)..(25): SEQ ID NO: 7740; WAN02472D; Start 8; Stop 32
agccattatttcaaatcctccaaaa

SEQ ID NO: 476386 - DNA, 25 bp, Artificial
  probe
  misc_feature (1)..(25): SEQ ID NO: 7741; WAN02472E; Start 27; Stop 51
taccattcctttcaacactccatta

SEQ ID NO: 476387 - DNA, 25 bp, Artificial
  probe
  misc_feature (1)..(25): SEQ ID NO: 7741; WAN02472E; Start 28; Stop 52
accattcctttcaacactccattat

SEQ ID NO: 476388 - DNA, 25 bp, Artificial
  probe
  misc_feature (1)..(25): SEQ ID NO: 7741; WAN02472E; Start 33; Stop 57
tcctttcaacactccattatatcgg

SEQ ID NO: 476389 - DNA, 25 bp, Artificial
  probe
  misc_feature (1)..(25): SEQ ID NO: 7741; WAN02472E; Start 26; Stop 50
ttaccattcctttcaacactccatt

SEQ ID NO: 476390 - DNA, 25 bp, Artificial
  probe
  misc_feature (1)..(25): SEQ ID NO: 7741; WAN02472E; Start 25; Stop 49
tttaccattcctttcaacactccat

SEQ ID NO: 476391 - DNA, 25 bp, Artificial
  probe
  misc_feature (1)..(25): SEQ ID NO: 7741; WAN02472E; Start 32; Stop 56
ttcctttcaacactccattatatcg

SEQ ID NO: 476392 - DNA, 25 bp, Artificial
  probe
  misc_feature (1)..(25): SEQ ID NO: 7741; WAN02472E; Start 29; Stop 53
ccattcctttcaacactccattata

SEQ ID NO: 476393 - DNA, 25 bp, Artificial
  probe
  misc_feature (1)..(25): SEQ ID NO: 7741; WAN02472E; Start 34; Stop 58
cctttcaacactccattatatcgga

SEQ ID NO: 476394 - DNA, 25 bp, Artificial
  probe
  misc_feature (1)..(25): SEQ ID NO: 7741; WAN02472E; Start 35; Stop 59
ctttcaacactccattatatcggat

SEQ ID NO: 476395 - DNA, 25 bp, Artificial
  probe
  misc_feature (1)..(25): SEQ ID NO: 7741; WAN02472E; Start 30; Stop 54
cattcctttcaacactccattatat

SEQ ID NO: 476396 - DNA, 25 bp, Artificial
  probe
  misc_feature (1)..(25): SEQ ID NO: 7741; WAN02472E; Start 37; Stop 61
ttcaacactccattatatcggattt

SEQ ID NO: 476397 - DNA, 25 bp, Artificial
  probe
  misc_feature (1)..(25): SEQ ID NO: 7741; WAN02472E; Start 36; Stop 60
tttcaacactccattatatcggatt

SEQ ID NO: 476398 - DNA, 25 bp, Artificial
  probe
  misc_feature (1)..(25): SEQ ID NO: 7741; WAN02472E; Start 31; Stop 55
attcctttcaacactccattatatc

SEQ ID NO: 476399 - DNA, 25 bp, Artificial
  probe
  misc_feature (1)..(25): SEQ ID NO: 7741; WAN02472E; Start 23; Stop 47
attttaccattcctttcaacactcc

SEQ ID NO: 476400 - DNA, 25 bp, Artificial
  probe
  misc_feature (1)..(25): SEQ ID NO: 7741; WAN02472E; Start 24; Stop 48
ttttaccattcctttcaacactcca

SEQ ID NO: 476401 - DNA, 25 bp, Artificial
  probe
  misc_feature (1)..(25): SEQ ID NO: 7741; WAN02472E; Start 22; Stop 46
gattttaccattcctttcaacactc

SEQ ID NO: 476402 - DNA, 25 bp, Artificial
  probe
  misc_feature (1)..(25): SEQ ID NO: 7741; WAN02472E; Start 75; Stop 99
aatttctatttcttttcacttcccc

SEQ ID NO: 476403 - DNA, 25 bp, Artificial
  probe
  misc_feature (1)..(25): SEQ ID NO: 7741; WAN02472E; Start 21; Stop 45
ggattttaccattcctttcaacact

SEQ ID NO: 476404 - DNA, 25 bp, Artificial
  probe
  misc_feature (1)..(25): SEQ ID NO: 7741; WAN02472E; Start 20; Stop 44
tggattttaccattcctttcaacac

SEQ ID NO: 476405 - DNA, 25 bp, Artificial
  probe
  misc_feature (1)..(25): SEQ ID NO: 7741; WAN02472E; Start 42; Stop 66
cactccattatatcggattttagca

SEQ ID NO: 476406 - DNA, 25 bp, Artificial
  probe
  misc_feature (1)..(25): SEQ ID NO: 7741; WAN02472E; Start 41; Stop 65
acactccattatatcggattttagc

SEQ ID NO: 476407 - DNA, 25 bp, Artificial
  probe
  misc_feature (1)..(25): SEQ ID NO: 7741; WAN02472E; Start 19; Stop 43
ttggattttaccattcctttcaaca

SEQ ID NO: 476408 - DNA, 25 bp, Artificial
  probe
  misc_feature (1)..(25): SEQ ID NO: 7741; WAN02472E; Start 16; Stop 40
acattggattttaccattcctttca

SEQ ID NO: 476409 - DNA, 25 bp, Artificial
  probe
  misc_feature (1)..(25): SEQ ID NO: 7741; WAN02472E; Start 38; Stop 62
tcaacactccattatatcggatttt

SEQ ID NO: 476410 - DNA, 25 bp, Artificial
  probe
  misc_feature (1)..(25): SEQ ID NO: 7741; WAN02472E; Start 18; Stop 42
attggattttaccattcctttcaac

SEQ ID NO: 476411 - DNA, 25 bp, Artificial
  probe
  misc_feature (1)..(25): SEQ ID NO: 7741; WAN02472E; Start 17; Stop 41
cattggattttaccattcctttcaa

SEQ ID NO: 476412 - DNA, 25 bp, Artificial
  probe
  misc_feature (1)..(25): SEQ ID NO: 7741; WAN02472E; Start 43; Stop 67
actccattatatcggattttagcat

SEQ ID NO: 476413 - DNA, 25 bp, Artificial
  probe
  misc_feature (1)..(25): SEQ ID NO: 7741; WAN02472E; Start 74; Stop 98
caatttctatttcttttcacttccc

SEQ ID NO: 476414 - DNA, 25 bp, Artificial
  probe
  misc_feature (1)..(25): SEQ ID NO: 7741; WAN02472E; Start 15; Stop 39
tacattggattttaccattcctttc

SEQ ID NO: 476415 - DNA, 25 bp, Artificial
  probe
  misc_feature (1)..(25): SEQ ID NO: 7741; WAN02472E; Start 44; Stop 68
ctccattatatcggattttagcatt

SEQ ID NO: 476416 - DNA, 25 bp, Artificial
  probe
  misc_feature (1)..(25): SEQ ID NO: 7741; WAN02472E; Start 39; Stop 63
caacactccattatatcggatttta

SEQ ID NO: 476417 - DNA, 25 bp, Artificial
  probe
  misc_feature (1)..(25): SEQ ID NO: 7741; WAN02472E; Start 46; Stop 70
ccattatatcggattttagcatttt

SEQ ID NO: 476418 - DNA, 25 bp, Artificial
  probe
  misc_feature (1)..(25): SEQ ID NO: 7741; WAN02472E; Start 14; Stop 38
ttacattggattttaccattccttt

SEQ ID NO: 476419 - DNA, 25 bp, Artificial
  probe
  misc_feature (1)..(25): SEQ ID NO: 7742; WAN02472F; Start 37; Stop 61
aatttgtttgattcgtgcttccttg

SEQ ID NO: 476420 - DNA, 25 bp, Artificial
  probe
  misc_feature (1)..(25): SEQ ID NO: 7742; WAN02472F; Start 38; Stop 62
atttgtttgattcgtgcttccttga

SEQ ID NO: 476421 - DNA, 25 bp, Artificial
  probe
  misc_feature (1)..(25): SEQ ID NO: 7742; WAN02472F; Start 39; Stop 63
tttgtttgattcgtgcttccttgag

SEQ ID NO: 476422 - DNA, 25 bp, Artificial
  probe
  misc_feature (1)..(25): SEQ ID NO: 7742; WAN02472F; Start 13; Stop 37
gaacttgatgttgaaggccaattaa

SEQ ID NO: 476423 - DNA, 25 bp, Artificial
  probe
  misc_feature (1)..(25): SEQ ID NO: 7742; WAN02472F; Start 35; Stop 59
taaatttgtttgattcgtgcttcct

SEQ ID NO: 476424 - DNA, 25 bp, Artificial
  probe
  misc_feature (1)..(25): SEQ ID NO: 7742; WAN02472F; Start 34; Stop 58
ttaaatttgtttgattcgtgcttcc

SEQ ID NO: 476425 - DNA, 25 bp, Artificial
  probe
  misc_feature (1)..(25): SEQ ID NO: 7742; WAN02472F; Start 36; Stop 60
aaatttgtttgattcgtgcttcctt

SEQ ID NO: 476426 - DNA, 25 bp, Artificial
  probe
  misc_feature (1)..(25): SEQ ID NO: 7742; WAN02472F; Start 12; Stop 36
ggaacttgatgttgaaggccaatta

SEQ ID NO: 476427 - DNA, 25 bp, Artificial
  probe
  misc_feature (1)..(25): SEQ ID NO: 7742; WAN02472F; Start 30; Stop 54
ccaattaaatttgtttgattcgtgc

SEQ ID NO: 476428 - DNA, 25 bp, Artificial
  probe
  misc_feature (1)..(25): SEQ ID NO: 7742; WAN02472F; Start 29; Stop 53
gccaattaaatttgtttgattcgtg

SEQ ID NO: 476429 - DNA, 25 bp, Artificial
  probe
  misc_feature (1)..(25): SEQ ID NO: 7742; WAN02472F; Start 33; Stop 57
attaaatttgtttgattcgtgcttc

SEQ ID NO: 476430 - DNA, 25 bp, Artificial
  probe
  misc_feature (1)..(25): SEQ ID NO: 7742; WAN02472F; Start 31; Stop 55
caattaaatttgtttgattcgtgct

SEQ ID NO: 476431 - DNA, 25 bp, Artificial
  probe
  misc_feature (1)..(25): SEQ ID NO: 7742; WAN02472F; Start 14; Stop 38
aacttgatgttgaaggccaattaaa

SEQ ID NO: 476432 - DNA, 25 bp, Artificial
  probe
  misc_feature (1)..(25): SEQ ID NO: 7742; WAN02472F; Start 32; Stop 56
aattaaatttgtttgattcgtgctt

SEQ ID NO: 476433 - DNA, 25 bp, Artificial
  probe
  misc_feature (1)..(25): SEQ ID NO: 7742; WAN02472F; Start 28; Stop 52
ggccaattaaatttgtttgattcgt

SEQ ID NO: 476434 - DNA, 25 bp, Artificial
  probe
  misc_feature (1)..(25): SEQ ID NO: 7742; WAN02472F; Start 15; Stop 39
acttgatgttgaaggccaattaaat

SEQ ID NO: 476435 - DNA, 25 bp, Artificial
  probe
  misc_feature (1)..(25): SEQ ID NO: 7742; WAN02472F; Start 27; Stop 51
aggccaattaaatttgtttgattcg

SEQ ID NO: 476436 - DNA, 25 bp, Artificial
  probe
  misc_feature (1)..(25): SEQ ID NO: 7742; WAN02472F; Start 19; Stop 43
gatgttgaaggccaattaaatttgt

SEQ ID NO: 476437 - DNA, 25 bp, Artificial
  probe
  misc_feature (1)..(25): SEQ ID NO: 7742; WAN02472F; Start 18; Stop 42
tgatgttgaaggccaattaaatttg

SEQ ID NO: 476438 - DNA, 25 bp, Artificial
  probe
  misc_feature (1)..(25): SEQ ID NO: 7742; WAN02472F; Start 21; Stop 45
tgttgaaggccaattaaatttgttt

SEQ ID NO: 476439 - DNA, 25 bp, Artificial
  probe
  misc_feature (1)..(25): SEQ ID NO: 7742; WAN02472F; Start 16; Stop 40
cttgatgttgaaggccaattaaatt

SEQ ID NO: 476440 - DNA, 25 bp, Artificial
  probe
  misc_feature (1)..(25): SEQ ID NO: 7742; WAN02472F; Start 11; Stop 35
aggaacttgatgttgaaggccaatt

SEQ ID NO: 476441 - DNA, 25 bp, Artificial
  probe
  misc_feature (1)..(25): SEQ ID NO: 7742; WAN02472F; Start 10; Stop 34
aaggaacttgatgttgaaggccaat

SEQ ID NO: 476442 - DNA, 25 bp, Artificial
  probe
  misc_feature (1)..(25): SEQ ID NO: 7742; WAN02472F; Start 23; Stop 47
ttgaaggccaattaaatttgtttga

SEQ ID NO: 476443 - DNA, 25 bp, Artificial
  probe
  misc_feature (1)..(25): SEQ ID NO: 7742; WAN02472F; Start 22; Stop 46
gttgaaggccaattaaatttgtttg

SEQ ID NO: 476444 - DNA, 25 bp, Artificial
  probe
  misc_feature (1)..(25): SEQ ID NO: 7742; WAN02472F; Start 20; Stop 44
atgttgaaggccaattaaatttgtt

SEQ ID NO: 476445 - DNA, 25 bp, Artificial
  probe
  misc_feature (1)..(25): SEQ ID NO: 7742; WAN02472F; Start 24; Stop 48
tgaaggccaattaaatttgtttgat

SEQ ID NO: 476446 - DNA, 25 bp, Artificial
  probe
  misc_feature (1)..(25): SEQ ID NO: 7742; WAN02472F; Start 17; Stop 41
ttgatgttgaaggccaattaaattt

SEQ ID NO: 476447 - DNA, 25 bp, Artificial
  probe
  misc_feature (1)..(25): SEQ ID NO: 7742; WAN02472F; Start 5; Stop 29
aaaccaaggaacttgatgttgaagg

SEQ ID NO: 476448 - DNA, 25 bp, Artificial
  probe
  misc_feature (1)..(25): SEQ ID NO: 7742; WAN02472F; Start 26; Stop 50
aaggccaattaaatttgtttgattc

SEQ ID NO: 476449 - DNA, 25 bp, Artificial
  probe
  misc_feature (1)..(25): SEQ ID NO: 7742; WAN02472F; Start 25; Stop 49
gaaggccaattaaatttgtttgatt

SEQ ID NO: 476450 - DNA, 25 bp, Artificial
  probe
  misc_feature (1)..(25): SEQ ID NO: 7742; WAN02472F; Start 6; Stop 30
aaccaaggaacttgatgttgaaggc

SEQ ID NO: 476451 - DNA, 25 bp, Artificial
  probe
  misc_feature (1)..(25): SEQ ID NO: 7742; WAN02472F; Start 4; Stop 28
aaaaccaaggaacttgatgttgaag

SEQ ID NO: 476452 - DNA, 25 bp, Artificial
  probe
  misc_feature (1)..(25): SEQ ID NO: 7743; WAN02472G; Start 28; Stop 52
aataaggttccgattctccatgtag

SEQ ID NO: 476453 - DNA, 25 bp, Artificial
  probe
  misc_feature (1)..(25): SEQ ID NO: 7743; WAN02472G; Start 29; Stop 53
ataaggttccgattctccatgtagc

SEQ ID NO: 476454 - DNA, 25 bp, Artificial
  probe
  misc_feature (1)..(25): SEQ ID NO: 7743; WAN02472G; Start 27; Stop 51
aaataaggttccgattctccatgta

SEQ ID NO: 476455 - DNA, 25 bp, Artificial
  probe
  misc_feature (1)..(25): SEQ ID NO: 7743; WAN02472G; Start 92; Stop 116
gtacagctccaaacaaacatctatg

SEQ ID NO: 476456 - DNA, 25 bp, Artificial
  probe
  misc_feature (1)..(25): SEQ ID NO: 7743; WAN02472G; Start 30; Stop 54
taaggttccgattctccatgtagca

SEQ ID NO: 476457 - DNA, 25 bp, Artificial
  probe
  misc_feature (1)..(25): SEQ ID NO: 7743; WAN02472G; Start 93; Stop 117
tacagctccaaacaaacatctatgc

SEQ ID NO: 476458 - DNA, 25 bp, Artificial
  probe
  misc_feature (1)..(25): SEQ ID NO: 7743; WAN02472G; Start 31; Stop 55
aaggttccgattctccatgtagcaa

SEQ ID NO: 476459 - DNA, 25 bp, Artificial
  probe
  misc_feature (1)..(25): SEQ ID NO: 7743; WAN02472G; Start 24; Stop 48
cgaaaataaggttccgattctccat

SEQ ID NO: 476460 - DNA, 25 bp, Artificial
  probe
  misc_feature (1)..(25): SEQ ID NO: 7743; WAN02472G; Start 26; Stop 50
aaaataaggttccgattctccatgt

SEQ ID NO: 476461 - DNA, 25 bp, Artificial
  probe
  misc_feature (1)..(25): SEQ ID NO: 7743; WAN02472G; Start 25; Stop 49
gaaaataaggttccgattctccatg

SEQ ID NO: 476462 - DNA, 25 bp, Artificial
  probe
  misc_feature (1)..(25): SEQ ID NO: 7743; WAN02472G; Start 98; Stop 122
ctccaaacaaacatctatgcgagga

SEQ ID NO: 476463 - DNA, 25 bp, Artificial
  probe
  misc_feature (1)..(25): SEQ ID NO: 7743; WAN02472G; Start 33; Stop 57
ggttccgattctccatgtagcaaag

SEQ ID NO: 476464 - DNA, 25 bp, Artificial
  probe
  misc_feature (1)..(25): SEQ ID NO: 7743; WAN02472G; Start 99; Stop 123
tccaaacaaacatctatgcgaggac

SEQ ID NO: 476465 - DNA, 25 bp, Artificial
  probe
  misc_feature (1)..(25): SEQ ID NO: 7743; WAN02472G; Start 91; Stop 115
tgtacagctccaaacaaacatctat

SEQ ID NO: 476466 - DNA, 25 bp, Artificial
  probe
  misc_feature (1)..(25): SEQ ID NO: 7743; WAN02472G; Start 32; Stop 56
aggttccgattctccatgtagcaaa

SEQ ID NO: 476467 - DNA, 25 bp, Artificial
  probe
  misc_feature (1)..(25): SEQ ID NO: 7743; WAN02472G; Start 95; Stop 119
cagctccaaacaaacatctatgcga

SEQ ID NO: 476468 - DNA, 25 bp, Artificial
  probe
  misc_feature (1)..(25): SEQ ID NO: 7743; WAN02472G; Start 96; Stop 120
agctccaaacaaacatctatgcgag

SEQ ID NO: 476469 - DNA, 25 bp, Artificial
  probe
  misc_feature (1)..(25): SEQ ID NO: 7743; WAN02472G; Start 34; Stop 58
gttccgattctccatgtagcaaagc

SEQ ID NO: 476470 - DNA, 25 bp, Artificial
  probe
  misc_feature (1)..(25): SEQ ID NO: 7743; WAN02472G; Start 94; Stop 118
acagctccaaacaaacatctatgcg

SEQ ID NO: 476471 - DNA, 25 bp, Artificial
  probe
  misc_feature (1)..(25): SEQ ID NO: 7743; WAN02472G; Start 97; Stop 121
gctccaaacaaacatctatgcgagg

SEQ ID NO: 476472 - DNA, 25 bp, Artificial
  probe
  misc_feature (1)..(25): SEQ ID NO: 7743; WAN02472G; Start 39; Stop 63
gattctccatgtagcaaagctatcc

SEQ ID NO: 476473 - DNA, 25 bp, Artificial
  probe
  misc_feature (1)..(25): SEQ ID NO: 7743; WAN02472G; Start 38; Stop 62
cgattctccatgtagcaaagctatc

SEQ ID NO: 476474 - DNA, 25 bp, Artificial
  probe
  misc_feature (1)..(25): SEQ ID NO: 7743; WAN02472G; Start 40; Stop 64
attctccatgtagcaaagctatccc

SEQ ID NO: 476475 - DNA, 25 bp, Artificial
  probe
  misc_feature (1)..(25): SEQ ID NO: 7743; WAN02472G; Start 90; Stop 114
ttgtacagctccaaacaaacatcta

SEQ ID NO: 476476 - DNA, 25 bp, Artificial
  probe
  misc_feature (1)..(25): SEQ ID NO: 7743; WAN02472G; Start 37; Stop 61
ccgattctccatgtagcaaagctat

SEQ ID NO: 476477 - DNA, 25 bp, Artificial
  probe
  misc_feature (1)..(25): SEQ ID NO: 7743; WAN02472G; Start 23; Stop 47
tcgaaaataaggttccgattctcca

SEQ ID NO: 476478 - DNA, 25 bp, Artificial
  probe
  misc_feature (1)..(25): SEQ ID NO: 7743; WAN02472G; Start 12; Stop 36
actagtggtgttcgaaaataaggtt

SEQ ID NO: 476479 - DNA, 25 bp, Artificial
  probe
  misc_feature (1)..(25): SEQ ID NO: 7743; WAN02472G; Start 13; Stop 37
ctagtggtgttcgaaaataaggttc

SEQ ID NO: 476480 - DNA, 25 bp, Artificial
  probe
  misc_feature (1)..(25): SEQ ID NO: 7743; WAN02472G; Start 89; Stop 113
cttgtacagctccaaacaaacatct

SEQ ID NO: 476481 - DNA, 25 bp, Artificial
  probe
  misc_feature (1)..(25): SEQ ID NO: 7743; WAN02472G; Start 10; Stop 34
caactagtggtgttcgaaaataagg

SEQ ID NO: 476482 - DNA, 25 bp, Artificial
  probe
  misc_feature (1)..(25): SEQ ID NO: 7743; WAN02472G; Start 11; Stop 35
aactagtggtgttcgaaaataaggt

SEQ ID NO: 476483 - DNA, 25 bp, Artificial
  probe
  misc_feature (1)..(25): SEQ ID NO: 7743; WAN02472G; Start 35; Stop 59
ttccgattctccatgtagcaaagct

SEQ ID NO: 476484 - DNA, 25 bp, Artificial
  probe
  misc_feature (1)..(25): SEQ ID NO: 7743; WAN02472G; Start 14; Stop 38
tagtggtgttcgaaaataaggttcc

SEQ ID NO: 476485 - DNA, 25 bp, Artificial
  probe
  misc_feature (1)..(25): SEQ ID NO: 7744; WAN02472H; Start 39; Stop 63
taccaagctctttgtactcaatgaa

SEQ ID NO: 476486 - DNA, 25 bp, Artificial
  probe
  misc_feature (1)..(25): SEQ ID NO: 7744; WAN02472H; Start 38; Stop 62
ttaccaagctctttgtactcaatga

SEQ ID NO: 476487 - DNA, 25 bp, Artificial
  probe
  misc_feature (1)..(25): SEQ ID NO: 7744; WAN02472H; Start 37; Stop 61
gttaccaagctctttgtactcaatg

SEQ ID NO: 476488 - DNA, 25 bp, Artificial
  probe
  misc_feature (1)..(25): SEQ ID NO: 7744; WAN02472H; Start 36; Stop 60
tgttaccaagctctttgtactcaat

SEQ ID NO: 476489 - DNA, 25 bp, Artificial
  probe
  misc_feature (1)..(25): SEQ ID NO: 7744; WAN02472H; Start 40; Stop 64
accaagctctttgtactcaatgaaa

SEQ ID NO: 476490 - DNA, 25 bp, Artificial
  probe
  misc_feature (1)..(25): SEQ ID NO: 7744; WAN02472H; Start 35; Stop 59
ctgttaccaagctctttgtactcaa

SEQ ID NO: 476491 - DNA, 25 bp, Artificial
  probe
  misc_feature (1)..(25): SEQ ID NO: 7744; WAN02472H; Start 34; Stop 58
cctgttaccaagctctttgtactca

SEQ ID NO: 476492 - DNA, 25 bp, Artificial
  probe
  misc_feature (1)..(25): SEQ ID NO: 7744; WAN02472H; Start 54; Stop 78
actcaatgaaaatcaaagagcaaat

SEQ ID NO: 476493 - DNA, 25 bp, Artificial
  probe
  misc_feature (1)..(25): SEQ ID NO: 7744; WAN02472H; Start 45; Stop 69
gctctttgtactcaatgaaaatcaa

SEQ ID NO: 476494 - DNA, 25 bp, Artificial
  probe
  misc_feature (1)..(25): SEQ ID NO: 7744; WAN02472H; Start 41; Stop 65
ccaagctctttgtactcaatgaaaa

SEQ ID NO: 476495 - DNA, 25 bp, Artificial
  probe
  misc_feature (1)..(25): SEQ ID NO: 7744; WAN02472H; Start 33; Stop 57
gcctgttaccaagctctttgtactc

SEQ ID NO: 476496 - DNA, 25 bp, Artificial
  probe
  misc_feature (1)..(25): SEQ ID NO: 7744; WAN02472H; Start 44; Stop 68
agctctttgtactcaatgaaaatca

SEQ ID NO: 476497 - DNA, 25 bp, Artificial
  probe
  misc_feature (1)..(25): SEQ ID NO: 7744; WAN02472H; Start 42; Stop 66
caagctctttgtactcaatgaaaat

SEQ ID NO: 476498 - DNA, 25 bp, Artificial
  probe
  misc_feature (1)..(25): SEQ ID NO: 7744; WAN02472H; Start 43; Stop 67
aagctctttgtactcaatgaaaatc

SEQ ID NO: 476499 - DNA, 25 bp, Artificial
  probe
  misc_feature (1)..(25): SEQ ID NO: 7744; WAN02472H; Start 32; Stop 56
agcctgttaccaagctctttgtact

SEQ ID NO: 476500 - DNA, 25 bp, Artificial
  probe
  misc_feature (1)..(25): SEQ ID NO: 7744; WAN02472H; Start 46; Stop 70
ctctttgtactcaatgaaaatcaaa

SEQ ID NO: 476501 - DNA, 25 bp, Artificial
  probe
  misc_feature (1)..(25): SEQ ID NO: 7745; WAN02472I; Start 92; Stop 116
gtgccaaatctatcccaaatcctat

SEQ ID NO: 476502 - DNA, 25 bp, Artificial
  probe
  misc_feature (1)..(25): SEQ ID NO: 7745; WAN02472I; Start 93; Stop 117
tgccaaatctatcccaaatcctata

SEQ ID NO: 476503 - DNA, 25 bp, Artificial
  probe
  misc_feature (1)..(25): SEQ ID NO: 7745; WAN02472I; Start 91; Stop 115
ggtgccaaatctatcccaaatccta

SEQ ID NO: 476504 - DNA, 25 bp, Artificial
  probe
  misc_feature (1)..(25): SEQ ID NO: 7745; WAN02472I; Start 6; Stop 30
tgcagaagatacgattatttcagct

SEQ ID NO: 476505 - DNA, 25 bp, Artificial
  probe
  misc_feature (1)..(25): SEQ ID NO: 7745; WAN02472I; Start 81; Stop 105
ctcagacaagggtgccaaatctatc

SEQ ID NO: 476506 - DNA, 25 bp, Artificial
  probe
  misc_feature (1)..(25): SEQ ID NO: 7745; WAN02472I; Start 80; Stop 104
tctcagacaagggtgccaaatctat

SEQ ID NO: 476507 - DNA, 25 bp, Artificial
  probe
  misc_feature (1)..(25): SEQ ID NO: 7745; WAN02472I; Start 79; Stop 103
atctcagacaagggtgccaaatcta

SEQ ID NO: 476508 - DNA, 25 bp, Artificial
  probe
  misc_feature (1)..(25): SEQ ID NO: 7745; WAN02472I; Start 82; Stop 106
tcagacaagggtgccaaatctatcc

SEQ ID NO: 476509 - DNA, 25 bp, Artificial
  probe
  misc_feature (1)..(25): SEQ ID NO: 7745; WAN02472I; Start 47; Stop 71
ttttgctcaatttctggacttgctg

SEQ ID NO: 476510 - DNA, 25 bp, Artificial
  probe
  misc_feature (1)..(25): SEQ ID NO: 7745; WAN02472I; Start 88; Stop 112
aagggtgccaaatctatcccaaatc

SEQ ID NO: 476511 - DNA, 25 bp, Artificial
  probe
  misc_feature (1)..(25): SEQ ID NO: 7745; WAN02472I; Start 87; Stop 111
caagggtgccaaatctatcccaaat

SEQ ID NO: 476512 - DNA, 25 bp, Artificial
  probe
  misc_feature (1)..(25): SEQ ID NO: 7745; WAN02472I; Start 78; Stop 102
catctcagacaagggtgccaaatct

SEQ ID NO: 476513 - DNA, 25 bp, Artificial
  probe
  misc_feature (1)..(25): SEQ ID NO: 7745; WAN02472I; Start 48; Stop 72
tttgctcaatttctggacttgctgc

SEQ ID NO: 476514 - DNA, 25 bp, Artificial
  probe
  misc_feature (1)..(25): SEQ ID NO: 7745; WAN02472I; Start 86; Stop 110
acaagggtgccaaatctatcccaaa

SEQ ID NO: 476515 - DNA, 25 bp, Artificial
  probe
  misc_feature (1)..(25): SEQ ID NO: 7745; WAN02472I; Start 90; Stop 114
gggtgccaaatctatcccaaatcct

SEQ ID NO: 476516 - DNA, 25 bp, Artificial
  probe
  misc_feature (1)..(25): SEQ ID NO: 7745; WAN02472I; Start 89; Stop 113
agggtgccaaatctatcccaaatcc

SEQ ID NO: 476517 - DNA, 25 bp, Artificial
  probe
  misc_feature (1)..(25): SEQ ID NO: 7745; WAN02472I; Start 85; Stop 109
gacaagggtgccaaatctatcccaa

SEQ ID NO: 476518 - DNA, 25 bp, Artificial
  probe
  misc_feature (1)..(25): SEQ ID NO: 7746; WAN02472J; Start 63; Stop 87
caaatcaactgctggactacaagag

SEQ ID NO: 476519 - DNA, 25 bp, Artificial
  probe
  misc_feature (1)..(25): SEQ ID NO: 7746; WAN02472J; Start 48; Stop 72
gagccattacccaagcaaatcaact

SEQ ID NO: 476520 - DNA, 25 bp, Artificial
  probe
  misc_feature (1)..(25): SEQ ID NO: 7746; WAN02472J; Start 49; Stop 73
agccattacccaagcaaatcaactg

SEQ ID NO: 476521 - DNA, 25 bp, Artificial
  probe
  misc_feature (1)..(25): SEQ ID NO: 7746; WAN02472J; Start 64; Stop 88
aaatcaactgctggactacaagagc

SEQ ID NO: 476522 - DNA, 25 bp, Artificial
  probe
  misc_feature (1)..(25): SEQ ID NO: 7746; WAN02472J; Start 65; Stop 89
aatcaactgctggactacaagagct

SEQ ID NO: 476523 - DNA, 25 bp, Artificial
  probe
  misc_feature (1)..(25): SEQ ID NO: 7746; WAN02472J; Start 47; Stop 71
cgagccattacccaagcaaatcaac

SEQ ID NO: 476524 - DNA, 25 bp, Artificial
  probe
  misc_feature (1)..(25): SEQ ID NO: 7746; WAN02472J; Start 44; Stop 68
caacgagccattacccaagcaaatc

SEQ ID NO: 476525 - DNA, 25 bp, Artificial
  probe
  misc_feature (1)..(25): SEQ ID NO: 7746; WAN02472J; Start 62; Stop 86
gcaaatcaactgctggactacaaga

SEQ ID NO: 476526 - DNA, 25 bp, Artificial
  probe
  misc_feature (1)..(25): SEQ ID NO: 7746; WAN02472J; Start 66; Stop 90
atcaactgctggactacaagagctg

SEQ ID NO: 476527 - DNA, 25 bp, Artificial
  probe
  misc_feature (1)..(25): SEQ ID NO: 7747; WAN02472K; Start 37; Stop 61
actctcttggtcatgtttactttca

SEQ ID NO: 476528 - DNA, 25 bp, Artificial
  probe
  misc_feature (1)..(25): SEQ ID NO: 7747; WAN02472K; Start 34; Stop 58
tcaactctcttggtcatgtttactt

SEQ ID NO: 476529 - DNA, 25 bp, Artificial
  probe
  misc_feature (1)..(25): SEQ ID NO: 7747; WAN02472K; Start 33; Stop 57
ttcaactctcttggtcatgtttact

SEQ ID NO: 476530 - DNA, 25 bp, Artificial
  probe
  misc_feature (1)..(25): SEQ ID NO: 7747; WAN02472K; Start 36; Stop 60
aactctcttggtcatgtttactttc

SEQ ID NO: 476531 - DNA, 25 bp, Artificial
  probe
  misc_feature (1)..(25): SEQ ID NO: 7747; WAN02472K; Start 32; Stop 56
tttcaactctcttggtcatgtttac

SEQ ID NO: 476532 - DNA, 25 bp, Artificial
  probe
  misc_feature (1)..(25): SEQ ID NO: 7747; WAN02472K; Start 35; Stop 59
caactctcttggtcatgtttacttt

SEQ ID NO: 476533 - DNA, 25 bp, Artificial
  probe
  misc_feature (1)..(25): SEQ ID NO: 7747; WAN02472K; Start 24; Stop 48
cctagatatttcaactctcttggtc

SEQ ID NO: 476534 - DNA, 25 bp, Artificial
  probe
  misc_feature (1)..(25): SEQ ID NO: 7747; WAN02472K; Start 38; Stop 62
ctctcttggtcatgtttactttcaa

SEQ ID NO: 476535 - DNA, 25 bp, Artificial
  probe
  misc_feature (1)..(25): SEQ ID NO: 7747; WAN02472K; Start 39; Stop 63
tctcttggtcatgtttactttcaaa

SEQ ID NO: 476536 - DNA, 25 bp, Artificial
  probe
  misc_feature (1)..(25): SEQ ID NO: 7747; WAN02472K; Start 28; Stop 52
gatatttcaactctcttggtcatgt

SEQ ID NO: 476537 - DNA, 25 bp, Artificial
  probe
  misc_feature (1)..(25): SEQ ID NO: 7747; WAN02472K; Start 31; Stop 55
atttcaactctcttggtcatgttta

SEQ ID NO: 476538 - DNA, 25 bp, Artificial
  probe
  misc_feature (1)..(25): SEQ ID NO: 7747; WAN02472K; Start 30; Stop 54
tatttcaactctcttggtcatgttt

SEQ ID NO: 476539 - DNA, 25 bp, Artificial
  probe
  misc_feature (1)..(25): SEQ ID NO: 7747; WAN02472K; Start 27; Stop 51
agatatttcaactctcttggtcatg

SEQ ID NO: 476540 - DNA, 25 bp, Artificial
  probe
  misc_feature (1)..(25): SEQ ID NO: 7747; WAN02472K; Start 22; Stop 46
aacctagatatttcaactctcttgg

SEQ ID NO: 476541 - DNA, 25 bp, Artificial
  probe
  misc_feature (1)..(25): SEQ ID NO: 7747; WAN02472K; Start 29; Stop 53
atatttcaactctcttggtcatgtt

SEQ ID NO: 476542 - DNA, 25 bp, Artificial
  probe
  misc_feature (1)..(25): SEQ ID NO: 7747; WAN02472K; Start 25; Stop 49
ctagatatttcaactctcttggtca

SEQ ID NO: 476543 - DNA, 25 bp, Artificial
  probe
  misc_feature (1)..(25): SEQ ID NO: 7747; WAN02472K; Start 23; Stop 47
acctagatatttcaactctcttggt

SEQ ID NO: 476544 - DNA, 25 bp, Artificial
  probe
  misc_feature (1)..(25): SEQ ID NO: 7747; WAN02472K; Start 26; Stop 50
tagatatttcaactctcttggtcat

SEQ ID NO: 476545 - DNA, 25 bp, Artificial
  probe
  misc_feature (1)..(25): SEQ ID NO: 7747; WAN02472K; Start 60; Stop 84
caaacctagccgtttctcaataaac

SEQ ID NO: 476546 - DNA, 25 bp, Artificial
  probe
  misc_feature (1)..(25): SEQ ID NO: 7747; WAN02472K; Start 59; Stop 83
tcaaacctagccgtttctcaataaa

SEQ ID NO: 476547 - DNA, 25 bp, Artificial
  probe
  misc_feature (1)..(25): SEQ ID NO: 7747; WAN02472K; Start 58; Stop 82
ttcaaacctagccgtttctcaataa

SEQ ID NO: 476548 - DNA, 25 bp, Artificial
  probe
  misc_feature (1)..(25): SEQ ID NO: 7747; WAN02472K; Start 57; Stop 81
tttcaaacctagccgtttctcaata

SEQ ID NO: 476549 - DNA, 25 bp, Artificial
  probe
  misc_feature (1)..(25): SEQ ID NO: 7747; WAN02472K; Start 52; Stop 76
tttactttcaaacctagccgtttct

SEQ ID NO: 476550 - DNA, 25 bp, Artificial
  probe
  misc_feature (1)..(25): SEQ ID NO: 7747; WAN02472K; Start 51; Stop 75
gtttactttcaaacctagccgtttc

SEQ ID NO: 476551 - DNA, 25 bp, Artificial
  probe
  misc_feature (1)..(25): SEQ ID NO: 7747; WAN02472K; Start 49; Stop 73
atgtttactttcaaacctagccgtt

SEQ ID NO: 476552 - DNA, 25 bp, Artificial
  probe
  misc_feature (1)..(25): SEQ ID NO: 7747; WAN02472K; Start 42; Stop 66
cttggtcatgtttactttcaaacct

SEQ ID NO: 476553 - DNA, 25 bp, Artificial
  probe
  misc_feature (1)..(25): SEQ ID NO: 7747; WAN02472K; Start 41; Stop 65
tcttggtcatgtttactttcaaacc

SEQ ID NO: 476554 - DNA, 25 bp, Artificial
  probe
  misc_feature (1)..(25): SEQ ID NO: 7747; WAN02472K; Start 53; Stop 77
ttactttcaaacctagccgtttctc

SEQ ID NO: 476555 - DNA, 25 bp, Artificial
  probe
  misc_feature (1)..(25): SEQ ID NO: 7747; WAN02472K; Start 46; Stop 70
gtcatgtttactttcaaacctagcc

SEQ ID NO: 476556 - DNA, 25 bp, Artificial
  probe
  misc_feature (1)..(25): SEQ ID NO: 7747; WAN02472K; Start 45; Stop 69
ggtcatgtttactttcaaacctagc

SEQ ID NO: 476557 - DNA, 25 bp, Artificial
  probe
  misc_feature (1)..(25): SEQ ID NO: 7747; WAN02472K; Start 50; Stop 74
tgtttactttcaaacctagccgttt

SEQ ID NO: 476558 - DNA, 25 bp, Artificial
  probe
  misc_feature (1)..(25): SEQ ID NO: 7747; WAN02472K; Start 2; Stop 26
tgataatttccagaacccaaaacct

SEQ ID NO: 476559 - DNA, 25 bp, Artificial
  probe
  misc_feature (1)..(25): SEQ ID NO: 7747; WAN02472K; Start 44; Stop 68
tggtcatgtttactttcaaacctag

SEQ ID NO: 476560 - DNA, 25 bp, Artificial
  probe
  misc_feature (1)..(25): SEQ ID NO: 7748; WAN02472L; Start 24; Stop 48
gagtaattttgactttgaacagcct

SEQ ID NO: 476561 - DNA, 25 bp, Artificial
  probe
  misc_feature (1)..(25): SEQ ID NO: 7748; WAN02472L; Start 23; Stop 47
agagtaattttgactttgaacagcc

SEQ ID NO: 476562 - DNA, 25 bp, Artificial
  probe
  misc_feature (1)..(25): SEQ ID NO: 7748; WAN02472L; Start 2; Stop 26
tgtcacttcaaactcacatggagag

SEQ ID NO: 476563 - DNA, 25 bp, Artificial
  probe
  misc_feature (1)..(25): SEQ ID NO: 7748; WAN02472L; Start 26; Stop 50
gtaattttgactttgaacagcctaa

SEQ ID NO: 476564 - DNA, 25 bp, Artificial
  probe
  misc_feature (1)..(25): SEQ ID NO: 7748; WAN02472L; Start 25; Stop 49
agtaattttgactttgaacagccta

SEQ ID NO: 476565 - DNA, 25 bp, Artificial
  probe
  misc_feature (1)..(25): SEQ ID NO: 7748; WAN02472L; Start 22; Stop 46
gagagtaattttgactttgaacagc

SEQ ID NO: 476566 - DNA, 25 bp, Artificial
  probe
  misc_feature (1)..(25): SEQ ID NO: 7748; WAN02472L; Start 20; Stop 44
tggagagtaattttgactttgaaca

SEQ ID NO: 476567 - DNA, 25 bp, Artificial
  probe
  misc_feature (1)..(25): SEQ ID NO: 7748; WAN02472L; Start 41; Stop 65
aacagcctaaaagtgccatcaaatt

SEQ ID NO: 476568 - DNA, 25 bp, Artificial
  probe
  misc_feature (1)..(25): SEQ ID NO: 7748; WAN02472L; Start 21; Stop 45
ggagagtaattttgactttgaacag

SEQ ID NO: 476569 - DNA, 25 bp, Artificial
  probe
  misc_feature (1)..(25): SEQ ID NO: 7748; WAN02472L; Start 40; Stop 64
gaacagcctaaaagtgccatcaaat

SEQ ID NO: 476570 - DNA, 25 bp, Artificial
  probe
  misc_feature (1)..(25): SEQ ID NO: 7748; WAN02472L; Start 27; Stop 51
taattttgactttgaacagcctaaa

SEQ ID NO: 476571 - DNA, 25 bp, Artificial
  probe
  misc_feature (1)..(25): SEQ ID NO: 7748; WAN02472L; Start 14; Stop 38
ctcacatggagagtaattttgactt

SEQ ID NO: 476572 - DNA, 25 bp, Artificial
  probe
  misc_feature (1)..(25): SEQ ID NO: 7748; WAN02472L; Start 16; Stop 40
cacatggagagtaattttgactttg

SEQ ID NO: 476573 - DNA, 25 bp, Artificial
  probe
  misc_feature (1)..(25): SEQ ID NO: 7748; WAN02472L; Start 1; Stop 25
atgtcacttcaaactcacatggaga

SEQ ID NO: 476574 - DNA, 25 bp, Artificial
  probe
  misc_feature (1)..(25): SEQ ID NO: 7748; WAN02472L; Start 17; Stop 41
acatggagagtaattttgactttga

SEQ ID NO: 476575 - DNA, 25 bp, Artificial
  probe
  misc_feature (1)..(25): SEQ ID NO: 7748; WAN02472L; Start 15; Stop 39
tcacatggagagtaattttgacttt

SEQ ID NO: 476576 - DNA, 25 bp, Artificial
  probe
  misc_feature (1)..(25): SEQ ID NO: 7748; WAN02472L; Start 19; Stop 43
atggagagtaattttgactttgaac

SEQ ID NO: 476577 - DNA, 25 bp, Artificial
  probe
  misc_feature (1)..(25): SEQ ID NO: 7748; WAN02472L; Start 6; Stop 30
acttcaaactcacatggagagtaat

SEQ ID NO: 476578 - DNA, 25 bp, Artificial
  probe
  misc_feature (1)..(25): SEQ ID NO: 7748; WAN02472L; Start 28; Stop 52
aattttgactttgaacagcctaaaa

SEQ ID NO: 476579 - DNA, 25 bp, Artificial
  probe
  misc_feature (1)..(25): SEQ ID NO: 7748; WAN02472L; Start 5; Stop 29
cacttcaaactcacatggagagtaa

SEQ ID NO: 476580 - DNA, 25 bp, Artificial
  probe
  misc_feature (1)..(25): SEQ ID NO: 7748; WAN02472L; Start 7; Stop 31
cttcaaactcacatggagagtaatt

SEQ ID NO: 476581 - DNA, 25 bp, Artificial
  probe
  misc_feature (1)..(25): SEQ ID NO: 7748; WAN02472L; Start 4; Stop 28
tcacttcaaactcacatggagagta

SEQ ID NO: 476582 - DNA, 25 bp, Artificial
  probe
  misc_feature (1)..(25): SEQ ID NO: 7748; WAN02472L; Start 8; Stop 32
ttcaaactcacatggagagtaattt

SEQ ID NO: 476583 - DNA, 25 bp, Artificial
  probe
  misc_feature (1)..(25): SEQ ID NO: 7748; WAN02472L; Start 18; Stop 42
catggagagtaattttgactttgaa

SEQ ID NO: 476584 - DNA, 25 bp, Artificial
  probe
  misc_feature (1)..(25): SEQ ID NO: 7748; WAN02472L; Start 29; Stop 53
attttgactttgaacagcctaaaag

SEQ ID NO: 476585 - DNA, 25 bp, Artificial
  probe
  misc_feature (1)..(25): SEQ ID NO: 7748; WAN02472L; Start 42; Stop 66
acagcctaaaagtgccatcaaattt

SEQ ID NO: 476586 - DNA, 25 bp, Artificial
  probe
  misc_feature (1)..(25): SEQ ID NO: 7748; WAN02472L; Start 39; Stop 63
tgaacagcctaaaagtgccatcaaa

SEQ ID NO: 476587 - DNA, 25 bp, Artificial
  probe
  misc_feature (1)..(25): SEQ ID NO: 7748; WAN02472L; Start 37; Stop 61
tttgaacagcctaaaagtgccatca

SEQ ID NO: 476588 - DNA, 25 bp, Artificial
  probe
  misc_feature (1)..(25): SEQ ID NO: 7748; WAN02472L; Start 3; Stop 27
gtcacttcaaactcacatggagagt

SEQ ID NO: 476589 - DNA, 25 bp, Artificial
  probe
  misc_feature (1)..(25): SEQ ID NO: 7748; WAN02472L; Start 36; Stop 60
ctttgaacagcctaaaagtgccatc

SEQ ID NO: 476590 - DNA, 25 bp, Artificial
  probe
  misc_feature (1)..(25): SEQ ID NO: 7748; WAN02472L; Start 13; Stop 37
actcacatggagagtaattttgact

SEQ ID NO: 476591 - DNA, 25 bp, Artificial
  probe
  misc_feature (1)..(25): SEQ ID NO: 7748; WAN02472L; Start 12; Stop 36
aactcacatggagagtaattttgac

SEQ ID NO: 476592 - DNA, 25 bp, Artificial
  probe
  misc_feature (1)..(25): SEQ ID NO: 7748; WAN02472L; Start 10; Stop 34
caaactcacatggagagtaattttg

SEQ ID NO: 476593 - DNA, 25 bp, Artificial
  probe
  misc_feature (1)..(25): SEQ ID NO: 7749; WAN02472M; Start 33; Stop 57
gaagaaaagagcttccaaagaagtc

SEQ ID NO: 476594 - DNA, 25 bp, Artificial
  probe
  misc_feature (1)..(25): SEQ ID NO: 7749; WAN02472M; Start 31; Stop 55
cagaagaaaagagcttccaaagaag

SEQ ID NO: 476595 - DNA, 25 bp, Artificial
  probe
  misc_feature (1)..(25): SEQ ID NO: 7749; WAN02472M; Start 32; Stop 56
agaagaaaagagcttccaaagaagt

SEQ ID NO: 476596 - DNA, 25 bp, Artificial
  probe
  misc_feature (1)..(25): SEQ ID NO: 7749; WAN02472M; Start 34; Stop 58
aagaaaagagcttccaaagaagtcc

SEQ ID NO: 476597 - DNA, 25 bp, Artificial
  probe
  misc_feature (1)..(25): SEQ ID NO: 7749; WAN02472M; Start 30; Stop 54
gcagaagaaaagagcttccaaagaa

SEQ ID NO: 476598 - DNA, 25 bp, Artificial
  probe
  misc_feature (1)..(25): SEQ ID NO: 7749; WAN02472M; Start 35; Stop 59
agaaaagagcttccaaagaagtccc

SEQ ID NO: 476599 - DNA, 25 bp, Artificial
  probe
  misc_feature (1)..(25): SEQ ID NO: 7749; WAN02472M; Start 36; Stop 60
gaaaagagcttccaaagaagtcccc

SEQ ID NO: 476600 - DNA, 25 bp, Artificial
  probe
  misc_feature (1)..(25): SEQ ID NO: 7750; WAN02472N; Start 63; Stop 87
tctgtatctgaccgtagcaaataat

SEQ ID NO: 476601 - DNA, 25 bp, Artificial
  probe
  misc_feature (1)..(25): SEQ ID NO: 7750; WAN02472N; Start 64; Stop 88
ctgtatctgaccgtagcaaataatt

SEQ ID NO: 476602 - DNA, 25 bp, Artificial
  probe
  misc_feature (1)..(25): SEQ ID NO: 7750; WAN02472N; Start 81; Stop 105
aaataatttcattgacggcagaagc

SEQ ID NO: 476603 - DNA, 25 bp, Artificial
  probe
  misc_feature (1)..(25): SEQ ID NO: 7750; WAN02472N; Start 80; Stop 104
caaataatttcattgacggcagaag

SEQ ID NO: 476604 - DNA, 25 bp, Artificial
  probe
  misc_feature (1)..(25): SEQ ID NO: 7750; WAN02472N; Start 77; Stop 101
tagcaaataatttcattgacggcag

SEQ ID NO: 476605 - DNA, 25 bp, Artificial
  probe
  misc_feature (1)..(25): SEQ ID NO: 7750; WAN02472N; Start 76; Stop 100
gtagcaaataatttcattgacggca

SEQ ID NO: 476606 - DNA, 25 bp, Artificial
  probe
  misc_feature (1)..(25): SEQ ID NO: 7750; WAN02472N; Start 65; Stop 89
tgtatctgaccgtagcaaataattt

SEQ ID NO: 476607 - DNA, 25 bp, Artificial
  probe
  misc_feature (1)..(25): SEQ ID NO: 7750; WAN02472N; Start 72; Stop 96
gaccgtagcaaataatttcattgac

SEQ ID NO: 476608 - DNA, 25 bp, Artificial
  probe
  misc_feature (1)..(25): SEQ ID NO: 7750; WAN02472N; Start 71; Stop 95
tgaccgtagcaaataatttcattga

SEQ ID NO: 476609 - DNA, 25 bp, Artificial
  probe
  misc_feature (1)..(25): SEQ ID NO: 7750; WAN02472N; Start 70; Stop 94
ctgaccgtagcaaataatttcattg

SEQ ID NO: 476610 - DNA, 25 bp, Artificial
  probe
  misc_feature (1)..(25): SEQ ID NO: 7750; WAN02472N; Start 69; Stop 93
tctgaccgtagcaaataatttcatt

SEQ ID NO: 476611 - DNA, 25 bp, Artificial
  probe
  misc_feature (1)..(25): SEQ ID NO: 7750; WAN02472N; Start 79; Stop 103
gcaaataatttcattgacggcagaa

SEQ ID NO: 476612 - DNA, 25 bp, Artificial
  probe
  misc_feature (1)..(25): SEQ ID NO: 7750; WAN02472N; Start 68; Stop 92
atctgaccgtagcaaataatttcat

SEQ ID NO: 476613 - DNA, 25 bp, Artificial
  probe
  misc_feature (1)..(25): SEQ ID NO: 7750; WAN02472N; Start 83; Stop 107
ataatttcattgacggcagaagcat

SEQ ID NO: 476614 - DNA, 25 bp, Artificial
  probe
  misc_feature (1)..(25): SEQ ID NO: 7750; WAN02472N; Start 66; Stop 90
gtatctgaccgtagcaaataatttc

SEQ ID NO: 476615 - DNA, 25 bp, Artificial
  probe
  misc_feature (1)..(25): SEQ ID NO: 7750; WAN02472N; Start 62; Stop 86
gtctgtatctgaccgtagcaaataa

SEQ ID NO: 476616 - DNA, 25 bp, Artificial
  probe
  misc_feature (1)..(25): SEQ ID NO: 7750; WAN02472N; Start 82; Stop 106
aataatttcattgacggcagaagca

SEQ ID NO: 476617 - DNA, 25 bp, Artificial
  probe
  misc_feature (1)..(25): SEQ ID NO: 7750; WAN02472N; Start 67; Stop 91
tatctgaccgtagcaaataatttca

SEQ ID NO: 476618 - DNA, 25 bp, Artificial
  probe
  misc_feature (1)..(25): SEQ ID NO: 7750; WAN02472N; Start 78; Stop 102
agcaaataatttcattgacggcaga

SEQ ID NO: 476619 - DNA, 25 bp, Artificial
  probe
  misc_feature (1)..(25): SEQ ID NO: 7750; WAN02472N; Start 61; Stop 85
agtctgtatctgaccgtagcaaata

SEQ ID NO: 476620 - DNA, 25 bp, Artificial
  probe
  misc_feature (1)..(25): SEQ ID NO: 7750; WAN02472N; Start 60; Stop 84
aagtctgtatctgaccgtagcaaat

SEQ ID NO: 476621 - DNA, 25 bp, Artificial
  probe
  misc_feature (1)..(25): SEQ ID NO: 7750; WAN02472N; Start 59; Stop 83
aaagtctgtatctgaccgtagcaaa

SEQ ID NO: 476622 - DNA, 25 bp, Artificial
  probe
  misc_feature (1)..(25): SEQ ID NO: 7750; WAN02472N; Start 21; Stop 45
cttccctgtttcaaagtatgataaa

SEQ ID NO: 476623 - DNA, 25 bp, Artificial
  probe
  misc_feature (1)..(25): SEQ ID NO: 7750; WAN02472N; Start 84; Stop 108
taatttcattgacggcagaagcatg

SEQ ID NO: 476624 - DNA, 25 bp, Artificial
  probe
  misc_feature (1)..(25): SEQ ID NO: 7750; WAN02472N; Start 58; Stop 82
caaagtctgtatctgaccgtagcaa

SEQ ID NO: 476625 - DNA, 25 bp, Artificial
  probe
  misc_feature (1)..(25): SEQ ID NO: 7750; WAN02472N; Start 56; Stop 80
gacaaagtctgtatctgaccgtagc

SEQ ID NO: 476626 - DNA, 25 bp, Artificial
  probe
  misc_feature (1)..(25): SEQ ID NO: 7750; WAN02472N; Start 73; Stop 97
accgtagcaaataatttcattgacg

SEQ ID NO: 476627 - DNA, 25 bp, Artificial
  probe
  misc_feature (1)..(25): SEQ ID NO: 7750; WAN02472N; Start 23; Stop 47
tccctgtttcaaagtatgataaact

SEQ ID NO: 476628 - DNA, 25 bp, Artificial
  probe
  misc_feature (1)..(25): SEQ ID NO: 7750; WAN02472N; Start 75; Stop 99
cgtagcaaataatttcattgacggc

SEQ ID NO: 476629 - DNA, 25 bp, Artificial
  probe
  misc_feature (1)..(25): SEQ ID NO: 7750; WAN02472N; Start 57; Stop 81
acaaagtctgtatctgaccgtagca

SEQ ID NO: 476630 - DNA, 25 bp, Artificial
  probe
  misc_feature (1)..(25): SEQ ID NO: 7750; WAN02472N; Start 20; Stop 44
acttccctgtttcaaagtatgataa

SEQ ID NO: 476631 - DNA, 25 bp, Artificial
  probe
  misc_feature (1)..(25): SEQ ID NO: 7750; WAN02472N; Start 19; Stop 43
aacttccctgtttcaaagtatgata

SEQ ID NO: 476632 - DNA, 25 bp, Artificial
  probe
  misc_feature (1)..(25): SEQ ID NO: 7750; WAN02472N; Start 18; Stop 42
taacttccctgtttcaaagtatgat

SEQ ID NO: 476633 - DNA, 25 bp, Artificial
  probe
  misc_feature (1)..(25): SEQ ID NO: 7751; WAN02472O; Start 26; Stop 50
gtttatcaatgggcttggtcttgtt

SEQ ID NO: 476634 - DNA, 25 bp, Artificial
  probe
  misc_feature (1)..(25): SEQ ID NO: 7751; WAN02472O; Start 27; Stop 51
tttatcaatgggcttggtcttgttg

SEQ ID NO: 476635 - DNA, 25 bp, Artificial
  probe
  misc_feature (1)..(25): SEQ ID NO: 7751; WAN02472O; Start 29; Stop 53
tatcaatgggcttggtcttgttgtt

SEQ ID NO: 476636 - DNA, 25 bp, Artificial
  probe
  misc_feature (1)..(25): SEQ ID NO: 7751; WAN02472O; Start 28; Stop 52
ttatcaatgggcttggtcttgttgt

SEQ ID NO: 476637 - DNA, 25 bp, Artificial
  probe
  misc_feature (1)..(25): SEQ ID NO: 7751; WAN02472O; Start 23; Stop 47
ttggtttatcaatgggcttggtctt

SEQ ID NO: 476638 - DNA, 25 bp, Artificial
  probe
  misc_feature (1)..(25): SEQ ID NO: 7751; WAN02472O; Start 25; Stop 49
ggtttatcaatgggcttggtcttgt

SEQ ID NO: 476639 - DNA, 25 bp, Artificial
  probe
  misc_feature (1)..(25): SEQ ID NO: 7751; WAN02472O; Start 24; Stop 48
tggtttatcaatgggcttggtcttg

SEQ ID NO: 476640 - DNA, 25 bp, Artificial
  probe
  misc_feature (1)..(25): SEQ ID NO: 7751; WAN02472O; Start 22; Stop 46
gttggtttatcaatgggcttggtct

SEQ ID NO: 476641 - DNA, 25 bp, Artificial
  probe
  misc_feature (1)..(25): SEQ ID NO: 7751; WAN02472O; Start 21; Stop 45
agttggtttatcaatgggcttggtc

SEQ ID NO: 476642 - DNA, 25 bp, Artificial
  probe
  misc_feature (1)..(25): SEQ ID NO: 7751; WAN02472O; Start 34; Stop 58
atgggcttggtcttgttgtttgaaa

SEQ ID NO: 476643 - DNA, 25 bp, Artificial
  probe
  misc_feature (1)..(25): SEQ ID NO: 7751; WAN02472O; Start 33; Stop 57
aatgggcttggtcttgttgtttgaa

SEQ ID NO: 476644 - DNA, 25 bp, Artificial
  probe
  misc_feature (1)..(25): SEQ ID NO: 7751; WAN02472O; Start 30; Stop 54
atcaatgggcttggtcttgttgttt

SEQ ID NO: 476645 - DNA, 25 bp, Artificial
  probe
  misc_feature (1)..(25): SEQ ID NO: 7751; WAN02472O; Start 20; Stop 44
cagttggtttatcaatgggcttggt

SEQ ID NO: 476646 - DNA, 25 bp, Artificial
  probe
  misc_feature (1)..(25): SEQ ID NO: 7751; WAN02472O; Start 17; Stop 41
tagcagttggtttatcaatgggctt

SEQ ID NO: 476647 - DNA, 25 bp, Artificial
  probe
  misc_feature (1)..(25): SEQ ID NO: 7751; WAN02472O; Start 16; Stop 40
ctagcagttggtttatcaatgggct

SEQ ID NO: 476648 - DNA, 25 bp, Artificial
  probe
  misc_feature (1)..(25): SEQ ID NO: 7751; WAN02472O; Start 35; Stop 59
tgggcttggtcttgttgtttgaaag

SEQ ID NO: 476649 - DNA, 25 bp, Artificial
  probe
  misc_feature (1)..(25): SEQ ID NO: 7751; WAN02472O; Start 32; Stop 56
caatgggcttggtcttgttgtttga

SEQ ID NO: 476650 - DNA, 25 bp, Artificial
  probe
  misc_feature (1)..(25): SEQ ID NO: 7751; WAN02472O; Start 31; Stop 55
tcaatgggcttggtcttgttgtttg

SEQ ID NO: 476651 - DNA, 25 bp, Artificial
  probe
  misc_feature (1)..(25): SEQ ID NO: 7751; WAN02472O; Start 39; Stop 63
cttggtcttgttgtttgaaagcttc

SEQ ID NO: 476652 - DNA, 25 bp, Artificial
  probe
  misc_feature (1)..(25): SEQ ID NO: 7751; WAN02472O; Start 48; Stop 72
gttgtttgaaagcttccaaggaatc

SEQ ID NO: 476653 - DNA, 25 bp, Artificial
  probe
  misc_feature (1)..(25): SEQ ID NO: 7751; WAN02472O; Start 47; Stop 71
tgttgtttgaaagcttccaaggaat

SEQ ID NO: 476654 - DNA, 25 bp, Artificial
  probe
  misc_feature (1)..(25): SEQ ID NO: 7751; WAN02472O; Start 46; Stop 70
ttgttgtttgaaagcttccaaggaa

SEQ ID NO: 476655 - DNA, 25 bp, Artificial
  probe
  misc_feature (1)..(25): SEQ ID NO: 7751; WAN02472O; Start 49; Stop 73
ttgtttgaaagcttccaaggaatcc

SEQ ID NO: 476656 - DNA, 25 bp, Artificial
  probe
  misc_feature (1)..(25): SEQ ID NO: 7751; WAN02472O; Start 19; Stop 43
gcagttggtttatcaatgggcttgg

SEQ ID NO: 476657 - DNA, 25 bp, Artificial
  probe
  misc_feature (1)..(25): SEQ ID NO: 7751; WAN02472O; Start 40; Stop 64
ttggtcttgttgtttgaaagcttcc

SEQ ID NO: 476658 - DNA, 25 bp, Artificial
  probe
  misc_feature (1)..(25): SEQ ID NO: 7751; WAN02472O; Start 42; Stop 66
ggtcttgttgtttgaaagcttccaa

SEQ ID NO: 476659 - DNA, 25 bp, Artificial
  probe
  misc_feature (1)..(25): SEQ ID NO: 7751; WAN02472O; Start 18; Stop 42
agcagttggtttatcaatgggcttg

SEQ ID NO: 476660 - DNA, 25 bp, Artificial
  probe
  misc_feature (1)..(25): SEQ ID NO: 7751; WAN02472O; Start 50; Stop 74
tgtttgaaagcttccaaggaatccc

SEQ ID NO: 476661 - DNA, 25 bp, Artificial
  probe
  misc_feature (1)..(25): SEQ ID NO: 7751; WAN02472O; Start 51; Stop 75
gtttgaaagcttccaaggaatccct

SEQ ID NO: 476662 - DNA, 25 bp, Artificial
  probe
  misc_feature (1)..(25): SEQ ID NO: 7751; WAN02472O; Start 43; Stop 67
gtcttgttgtttgaaagcttccaag

SEQ ID NO: 476663 - DNA, 25 bp, Artificial
  probe
  misc_feature (1)..(25): SEQ ID NO: 7751; WAN02472O; Start 41; Stop 65
tggtcttgttgtttgaaagcttcca

SEQ ID NO: 476664 - DNA, 25 bp, Artificial
  probe
  misc_feature (1)..(25): SEQ ID NO: 7751; WAN02472O; Start 45; Stop 69
cttgttgtttgaaagcttccaagga

SEQ ID NO: 476665 - DNA, 25 bp, Artificial
  probe
  misc_feature (1)..(25): SEQ ID NO: 7751; WAN02472O; Start 44; Stop 68
tcttgttgtttgaaagcttccaagg

SEQ ID NO: 476666 - DNA, 25 bp, Artificial
  probe
  misc_feature (1)..(25): SEQ ID NO: 7752; WAN02472P; Start 42; Stop 66
tttctggctctttgtcaactgtagt

SEQ ID NO: 476667 - DNA, 25 bp, Artificial
  probe
  misc_feature (1)..(25): SEQ ID NO: 7752; WAN02472P; Start 43; Stop 67
ttctggctctttgtcaactgtagtg

SEQ ID NO: 476668 - DNA, 25 bp, Artificial
  probe
  misc_feature (1)..(25): SEQ ID NO: 7752; WAN02472P; Start 41; Stop 65
ttttctggctctttgtcaactgtag

SEQ ID NO: 476669 - DNA, 25 bp, Artificial
  probe
  misc_feature (1)..(25): SEQ ID NO: 7752; WAN02472P; Start 44; Stop 68
tctggctctttgtcaactgtagtgg

SEQ ID NO: 476670 - DNA, 25 bp, Artificial
  probe
  misc_feature (1)..(25): SEQ ID NO: 7752; WAN02472P; Start 57; Stop 81
caactgtagtgggttgaagaaaagc

SEQ ID NO: 476671 - DNA, 25 bp, Artificial
  probe
  misc_feature (1)..(25): SEQ ID NO: 7753; WAN02Q9FZ; Start 165; Stop 189
aagactaaccttggatattgttgag

SEQ ID NO: 476672 - DNA, 25 bp, Artificial
  probe
  misc_feature (1)..(25): SEQ ID NO: 7753; WAN02Q9FZ; Start 166; Stop 190
agactaaccttggatattgttgagg

SEQ ID NO: 476673 - DNA, 25 bp, Artificial
  probe
  misc_feature (1)..(25): SEQ ID NO: 7753; WAN02Q9FZ; Start 167; Stop 191
gactaaccttggatattgttgaggc

SEQ ID NO: 476674 - DNA, 25 bp, Artificial
  probe
  misc_feature (1)..(25): SEQ ID NO: 7753; WAN02Q9FZ; Start 169; Stop 193
ctaaccttggatattgttgaggcac

SEQ ID NO: 476675 - DNA, 25 bp, Artificial
  probe
  misc_feature (1)..(25): SEQ ID NO: 7753; WAN02Q9FZ; Start 402; Stop 426
cttgaaaggaaatgttaatgacggg

SEQ ID NO: 476676 - DNA, 25 bp, Artificial
  probe
  misc_feature (1)..(25): SEQ ID NO: 7753; WAN02Q9FZ; Start 168; Stop 192
actaaccttggatattgttgaggca

SEQ ID NO: 476677 - DNA, 25 bp, Artificial
  probe
  misc_feature (1)..(25): SEQ ID NO: 7753; WAN02Q9FZ; Start 249; Stop 273
aaagtattggatgaatcgtttaggg

SEQ ID NO: 476678 - DNA, 25 bp, Artificial
  probe
  misc_feature (1)..(25): SEQ ID NO: 7753; WAN02Q9FZ; Start 250; Stop 274
aagtattggatgaatcgtttagggc

SEQ ID NO: 476679 - DNA, 25 bp, Artificial
  probe
  misc_feature (1)..(25): SEQ ID NO: 7753; WAN02Q9FZ; Start 401; Stop 425
gcttgaaaggaaatgttaatgacgg

SEQ ID NO: 476680 - DNA, 25 bp, Artificial
  probe
  misc_feature (1)..(25): SEQ ID NO: 7753; WAN02Q9FZ; Start 399; Stop 423
ccgcttgaaaggaaatgttaatgac

SEQ ID NO: 476681 - DNA, 25 bp, Artificial
  probe
  misc_feature (1)..(25): SEQ ID NO: 7753; WAN02Q9FZ; Start 152; Stop 176
gctcaatatgcacaagactaacctt

SEQ ID NO: 476682 - DNA, 25 bp, Artificial
  probe
  misc_feature (1)..(25): SEQ ID NO: 7753; WAN02Q9FZ; Start 400; Stop 424
cgcttgaaaggaaatgttaatgacg

SEQ ID NO: 476683 - DNA, 25 bp, Artificial
  probe
  misc_feature (1)..(25): SEQ ID NO: 7753; WAN02Q9FZ; Start 149; Stop 173
gaggctcaatatgcacaagactaac

SEQ ID NO: 476684 - DNA, 25 bp, Artificial
  probe
  misc_feature (1)..(25): SEQ ID NO: 7753; WAN02Q9FZ; Start 295; Stop 319
ctttctaagaggaagttcattgcgg

SEQ ID NO: 476685 - DNA, 25 bp, Artificial
  probe
  misc_feature (1)..(25): SEQ ID NO: 7753; WAN02Q9FZ; Start 248; Stop 272
caaagtattggatgaatcgtttagg

SEQ ID NO: 476686 - DNA, 25 bp, Artificial
  probe
  misc_feature (1)..(25): SEQ ID NO: 7753; WAN02Q9FZ; Start 122; Stop 146
atgcggtttattgttgtactgtgag

SEQ ID NO: 476687 - DNA, 25 bp, Artificial
  probe
  misc_feature (1)..(25): SEQ ID NO: 7753; WAN02Q9FZ; Start 121; Stop 145
gatgcggtttattgttgtactgtga

SEQ ID NO: 476688 - DNA, 25 bp, Artificial
  probe
  misc_feature (1)..(25): SEQ ID NO: 7753; WAN02Q9FZ; Start 119; Stop 143
ctgatgcggtttattgttgtactgt

SEQ ID NO: 476689 - DNA, 25 bp, Artificial
  probe
  misc_feature (1)..(25): SEQ ID NO: 7753; WAN02Q9FZ; Start 244; Stop 268
agtacaaagtattggatgaatcgtt

SEQ ID NO: 476690 - DNA, 25 bp, Artificial
  probe
  misc_feature (1)..(25): SEQ ID NO: 7753; WAN02Q9FZ; Start 170; Stop 194
taaccttggatattgttgaggcacg

SEQ ID NO: 476691 - DNA, 25 bp, Artificial
  probe
  misc_feature (1)..(25): SEQ ID NO: 7753; WAN02Q9FZ; Start 247; Stop 271
acaaagtattggatgaatcgtttag

SEQ ID NO: 476692 - DNA, 25 bp, Artificial
  probe
  misc_feature (1)..(25): SEQ ID NO: 7753; WAN02Q9FZ; Start 120; Stop 144
tgatgcggtttattgttgtactgtg

SEQ ID NO: 476693 - DNA, 25 bp, Artificial
  probe
  misc_feature (1)..(25): SEQ ID NO: 7753; WAN02Q9FZ; Start 398; Stop 422
gccgcttgaaaggaaatgttaatga

SEQ ID NO: 476694 - DNA, 25 bp, Artificial
  probe
  misc_feature (1)..(25): SEQ ID NO: 7753; WAN02Q9FZ; Start 127; Stop 151
gtttattgttgtactgtgaggcgag

SEQ ID NO: 476695 - DNA, 25 bp, Artificial
  probe
  misc_feature (1)..(25): SEQ ID NO: 7753; WAN02Q9FZ; Start 274; Stop 298
ccactgtttaacctgaaaggacttt

SEQ ID NO: 476696 - DNA, 25 bp, Artificial
  probe
  misc_feature (1)..(25): SEQ ID NO: 7753; WAN02Q9FZ; Start 151; Stop 175
ggctcaatatgcacaagactaacct

SEQ ID NO: 476697 - DNA, 25 bp, Artificial
  probe
  misc_feature (1)..(25): SEQ ID NO: 7753; WAN02Q9FZ; Start 150; Stop 174
aggctcaatatgcacaagactaacc

SEQ ID NO: 476698 - DNA, 25 bp, Artificial
  probe
  misc_feature (1)..(25): SEQ ID NO: 7753; WAN02Q9FZ; Start 34; Stop 58
attcaatttcaggaagttgctgctt

SEQ ID NO: 476699 - DNA, 25 bp, Artificial
  probe
  misc_feature (1)..(25): SEQ ID NO: 7753; WAN02Q9FZ; Start 33; Stop 57
aattcaatttcaggaagttgctgct

SEQ ID NO: 476700 - DNA, 25 bp, Artificial
  probe
  misc_feature (1)..(25): SEQ ID NO: 7753; WAN02Q9FZ; Start 32; Stop 56
aaattcaatttcaggaagttgctgc

SEQ ID NO: 476701 - DNA, 25 bp, Artificial
  probe
  misc_feature (1)..(25): SEQ ID NO: 7753; WAN02Q9FZ; Start 148; Stop 172
cgaggctcaatatgcacaagactaa

SEQ ID NO: 476702 - DNA, 25 bp, Artificial
  probe
  misc_feature (1)..(25): SEQ ID NO: 7753; WAN02Q9FZ; Start 245; Stop 269
gtacaaagtattggatgaatcgttt

SEQ ID NO: 476703 - DNA, 25 bp, Artificial
  probe
  misc_feature (1)..(25): SEQ ID NO: 7753; WAN02Q9FZ; Start 118; Stop 142
cctgatgcggtttattgttgtactg

SEQ ID NO: 476704 - DNA, 25 bp, Artificial
  probe
  misc_feature (1)..(25): SEQ ID NO: 7754; WAN02Q9J2; Start 249; Stop 273
tactcatcagataacagcaatacct

SEQ ID NO: 476705 - DNA, 25 bp, Artificial
  probe
  misc_feature (1)..(25): SEQ ID NO: 7754; WAN02Q9J2; Start 332; Stop 356
tgatagcattgaaggatgagactaa

SEQ ID NO: 476706 - DNA, 25 bp, Artificial
  probe
  misc_feature (1)..(25): SEQ ID NO: 7754; WAN02Q9J2; Start 331; Stop 355
atgatagcattgaaggatgagacta

SEQ ID NO: 476707 - DNA, 25 bp, Artificial
  probe
  misc_feature (1)..(25): SEQ ID NO: 7754; WAN02Q9J2; Start 248; Stop 272
atactcatcagataacagcaatacc

SEQ ID NO: 476708 - DNA, 25 bp, Artificial
  probe
  misc_feature (1)..(25): SEQ ID NO: 7754; WAN02Q9J2; Start 360; Stop 384
aattgaggagtggcagcatatagaa

SEQ ID NO: 476709 - DNA, 25 bp, Artificial
  probe
  misc_feature (1)..(25): SEQ ID NO: 7754; WAN02Q9J2; Start 178; Stop 202
ctaacggagttgactaatgttgtgg

SEQ ID NO: 476710 - DNA, 25 bp, Artificial
  probe
  misc_feature (1)..(25): SEQ ID NO: 7754; WAN02Q9J2; Start 177; Stop 201
cctaacggagttgactaatgttgtg

SEQ ID NO: 476711 - DNA, 25 bp, Artificial
  probe
  misc_feature (1)..(25): SEQ ID NO: 7754; WAN02Q9J2; Start 334; Stop 358
atagcattgaaggatgagactaatc

SEQ ID NO: 476712 - DNA, 25 bp, Artificial
  probe
  misc_feature (1)..(25): SEQ ID NO: 7754; WAN02Q9J2; Start 333; Stop 357
gatagcattgaaggatgagactaat

SEQ ID NO: 476713 - DNA, 25 bp, Artificial
  probe
  misc_feature (1)..(25): SEQ ID NO: 7754; WAN02Q9J2; Start 250; Stop 274
actcatcagataacagcaatacctg

SEQ ID NO: 476714 - DNA, 25 bp, Artificial
  probe
  misc_feature (1)..(25): SEQ ID NO: 7754; WAN02Q9J2; Start 438; Stop 462
aatatcacaggaggtactagactac

SEQ ID NO: 476715 - DNA, 25 bp, Artificial
  probe
  misc_feature (1)..(25): SEQ ID NO: 7754; WAN02Q9J2; Start 361; Stop 385
attgaggagtggcagcatatagaac

SEQ ID NO: 476716 - DNA, 25 bp, Artificial
  probe
  misc_feature (1)..(25): SEQ ID NO: 7754; WAN02Q9J2; Start 434; Stop 458
ggataatatcacaggaggtactaga

SEQ ID NO: 476717 - DNA, 25 bp, Artificial
  probe
  misc_feature (1)..(25): SEQ ID NO: 7754; WAN02Q9J2; Start 462; Stop 486
cctttcatcctacataaatagacgc

SEQ ID NO: 476718 - DNA, 25 bp, Artificial
  probe
  misc_feature (1)..(25): SEQ ID NO: 7754; WAN02Q9J2; Start 185; Stop 209
agttgactaatgttgtgggaaattg

SEQ ID NO: 476719 - DNA, 25 bp, Artificial
  probe
  misc_feature (1)..(25): SEQ ID NO: 7754; WAN02Q9J2; Start 244; Stop 268
acgtatactcatcagataacagcaa

SEQ ID NO: 476720 - DNA, 25 bp, Artificial
  probe
  misc_feature (1)..(25): SEQ ID NO: 7754; WAN02Q9J2; Start 243; Stop 267
aacgtatactcatcagataacagca

SEQ ID NO: 476721 - DNA, 25 bp, Artificial
  probe
  misc_feature (1)..(25): SEQ ID NO: 7754; WAN02Q9J2; Start 184; Stop 208
gagttgactaatgttgtgggaaatt

SEQ ID NO: 476722 - DNA, 25 bp, Artificial
  probe
  misc_feature (1)..(25): SEQ ID NO: 7754; WAN02Q9J2; Start 436; Stop 460
ataatatcacaggaggtactagact

SEQ ID NO: 476723 - DNA, 25 bp, Artificial
  probe
  misc_feature (1)..(25): SEQ ID NO: 7754; WAN02Q9J2; Start 237; Stop 261
caggacaacgtatactcatcagata

SEQ ID NO: 476724 - DNA, 25 bp, Artificial
  probe
  misc_feature (1)..(25): SEQ ID NO: 7754; WAN02Q9J2; Start 426; Stop 450
atggaatgggataatatcacaggag

SEQ ID NO: 476725 - DNA, 25 bp, Artificial
  probe
  misc_feature (1)..(25): SEQ ID NO: 7754; WAN02Q9J2; Start 242; Stop 266
caacgtatactcatcagataacagc

SEQ ID NO: 476726 - DNA, 25 bp, Artificial
  probe
  misc_feature (1)..(25): SEQ ID NO: 7754; WAN02Q9J2; Start 8; Stop 32
gcaattcttcaagcaataaacagga

SEQ ID NO: 476727 - DNA, 25 bp, Artificial
  probe
  misc_feature (1)..(25): SEQ ID NO: 7754; WAN02Q9J2; Start 330; Stop 354
aatgatagcattgaaggatgagact

SEQ ID NO: 476728 - DNA, 25 bp, Artificial
  probe
  misc_feature (1)..(25): SEQ ID NO: 7754; WAN02Q9J2; Start 14; Stop 38
cttcaagcaataaacaggaatacca

SEQ ID NO: 476729 - DNA, 25 bp, Artificial
  probe
  misc_feature (1)..(25): SEQ ID NO: 7754; WAN02Q9J2; Start 16; Stop 40
tcaagcaataaacaggaataccaat

SEQ ID NO: 476730 - DNA, 25 bp, Artificial
  probe
  misc_feature (1)..(25): SEQ ID NO: 7754; WAN02Q9J2; Start 187; Stop 211
ttgactaatgttgtgggaaattgga

SEQ ID NO: 476731 - DNA, 25 bp, Artificial
  probe
  misc_feature (1)..(25): SEQ ID NO: 7754; WAN02Q9J2; Start 186; Stop 210
gttgactaatgttgtgggaaattgg

SEQ ID NO: 476732 - DNA, 25 bp, Artificial
  probe
  misc_feature (1)..(25): SEQ ID NO: 7754; WAN02Q9J2; Start 13; Stop 37
tcttcaagcaataaacaggaatacc

SEQ ID NO: 476733 - DNA, 25 bp, Artificial
  probe
  misc_feature (1)..(25): SEQ ID NO: 7754; WAN02Q9J2; Start 463; Stop 487
ctttcatcctacataaatagacgca

SEQ ID NO: 476734 - DNA, 25 bp, Artificial
  probe
  misc_feature (1)..(25): SEQ ID NO: 7754; WAN02Q9J2; Start 15; Stop 39
ttcaagcaataaacaggaataccaa

SEQ ID NO: 476735 - DNA, 25 bp, Artificial
  probe
  misc_feature (1)..(25): SEQ ID NO: 7754; WAN02Q9J2; Start 429; Stop 453
gaatgggataatatcacaggaggta

SEQ ID NO: 476736 - DNA, 25 bp, Artificial
  probe
  misc_feature (1)..(25): SEQ ID NO: 7754; WAN02Q9J2; Start 239; Stop 263
ggacaacgtatactcatcagataac

SEQ ID NO: 476737 - DNA, 25 bp, Artificial
  probe
  misc_feature (1)..(25): SEQ ID NO: 7755; WAN02QB8Q; Start 76; Stop 100
cagtcagttgctcaatgtacctata

SEQ ID NO: 476738 - DNA, 25 bp, Artificial
  probe
  misc_feature (1)..(25): SEQ ID NO: 7755; WAN02QB8Q; Start 83; Stop 107
ttgctcaatgtacctataaccagac

SEQ ID NO: 476739 - DNA, 25 bp, Artificial
  probe
  misc_feature (1)..(25): SEQ ID NO: 7755; WAN02QB8Q; Start 77; Stop 101
agtcagttgctcaatgtacctataa

SEQ ID NO: 476740 - DNA, 25 bp, Artificial
  probe
  misc_feature (1)..(25): SEQ ID NO: 7755; WAN02QB8Q; Start 82; Stop 106
gttgctcaatgtacctataaccaga

SEQ ID NO: 476741 - DNA, 25 bp, Artificial
  probe
  misc_feature (1)..(25): SEQ ID NO: 7755; WAN02QB8Q; Start 81; Stop 105
agttgctcaatgtacctataaccag

SEQ ID NO: 476742 - DNA, 25 bp, Artificial
  probe
  misc_feature (1)..(25): SEQ ID NO: 7755; WAN02QB8Q; Start 79; Stop 103
tcagttgctcaatgtacctataacc

SEQ ID NO: 476743 - DNA, 25 bp, Artificial
  probe
  misc_feature (1)..(25): SEQ ID NO: 7755; WAN02QB8Q; Start 78; Stop 102
gtcagttgctcaatgtacctataac

SEQ ID NO: 476744 - DNA, 25 bp, Artificial
  probe
  misc_feature (1)..(25): SEQ ID NO: 7755; WAN02QB8Q; Start 80; Stop 104
cagttgctcaatgtacctataacca

SEQ ID NO: 476745 - DNA, 25 bp, Artificial
  probe
  misc_feature (1)..(25): SEQ ID NO: 7755; WAN02QB8Q; Start 88; Stop 112
caatgtacctataaccagaccgttc

SEQ ID NO: 476746 - DNA, 25 bp, Artificial
  probe
  misc_feature (1)..(25): SEQ ID NO: 7755; WAN02QB8Q; Start 75; Stop 99
tcagtcagttgctcaatgtacctat

SEQ ID NO: 476747 - DNA, 25 bp, Artificial
  probe
  misc_feature (1)..(25): SEQ ID NO: 7755; WAN02QB8Q; Start 89; Stop 113
aatgtacctataaccagaccgttca

SEQ ID NO: 476748 - DNA, 25 bp, Artificial
  probe
  misc_feature (1)..(25): SEQ ID NO: 7755; WAN02QB8Q; Start 87; Stop 111
tcaatgtacctataaccagaccgtt

SEQ ID NO: 476749 - DNA, 25 bp, Artificial
  probe
  misc_feature (1)..(25): SEQ ID NO: 7755; WAN02QB8Q; Start 86; Stop 110
ctcaatgtacctataaccagaccgt

SEQ ID NO: 476750 - DNA, 25 bp, Artificial
  probe
  misc_feature (1)..(25): SEQ ID NO: 7755; WAN02QB8Q; Start 74; Stop 98
ttcagtcagttgctcaatgtaccta

SEQ ID NO: 476751 - DNA, 25 bp, Artificial
  probe
  misc_feature (1)..(25): SEQ ID NO: 7755; WAN02QB8Q; Start 84; Stop 108
tgctcaatgtacctataaccagacc

SEQ ID NO: 476752 - DNA, 25 bp, Artificial
  probe
  misc_feature (1)..(25): SEQ ID NO: 7755; WAN02QB8Q; Start 90; Stop 114
atgtacctataaccagaccgttcag

SEQ ID NO: 476753 - DNA, 25 bp, Artificial
  probe
  misc_feature (1)..(25): SEQ ID NO: 7755; WAN02QB8Q; Start 15; Stop 39
cactggatataccaccgttgatata

SEQ ID NO: 476754 - DNA, 25 bp, Artificial
  probe
  misc_feature (1)..(25): SEQ ID NO: 7755; WAN02QB8Q; Start 14; Stop 38
tcactggatataccaccgttgatat

SEQ ID NO: 476755 - DNA, 25 bp, Artificial
  probe
  misc_feature (1)..(25): SEQ ID NO: 7755; WAN02QB8Q; Start 607; Stop 631
agaatgcttaatgaattacaacagt

SEQ ID NO: 476756 - DNA, 25 bp, Artificial
  probe
  misc_feature (1)..(25): SEQ ID NO: 7755; WAN02QB8Q; Start 606; Stop 630
cagaatgcttaatgaattacaacag

SEQ ID NO: 476757 - DNA, 25 bp, Artificial
  probe
  misc_feature (1)..(25): SEQ ID NO: 7755; WAN02QB8Q; Start 36; Stop 60
tatatcccaatggcatcgtaaagaa

SEQ ID NO: 476758 - DNA, 25 bp, Artificial
  probe
  misc_feature (1)..(25): SEQ ID NO: 7755; WAN02QB8Q; Start 85; Stop 109
gctcaatgtacctataaccagaccg

SEQ ID NO: 476759 - DNA, 25 bp, Artificial
  probe
  misc_feature (1)..(25): SEQ ID NO: 7755; WAN02QB8Q; Start 16; Stop 40
actggatataccaccgttgatatat

SEQ ID NO: 476760 - DNA, 25 bp, Artificial
  probe
  misc_feature (1)..(25): SEQ ID NO: 7755; WAN02QB8Q; Start 342; Stop 366
gcagtttctacacatatattcgcaa

SEQ ID NO: 476761 - DNA, 25 bp, Artificial
  probe
  misc_feature (1)..(25): SEQ ID NO: 7755; WAN02QB8Q; Start 37; Stop 61
atatcccaatggcatcgtaaagaac

SEQ ID NO: 476762 - DNA, 25 bp, Artificial
  probe
  misc_feature (1)..(25): SEQ ID NO: 7755; WAN02QB8Q; Start 35; Stop 59
atatatcccaatggcatcgtaaaga

SEQ ID NO: 476763 - DNA, 25 bp, Artificial
  probe
  misc_feature (1)..(25): SEQ ID NO: 7755; WAN02QB8Q; Start 13; Stop 37
atcactggatataccaccgttgata

SEQ ID NO: 476764 - DNA, 25 bp, Artificial
  probe
  misc_feature (1)..(25): SEQ ID NO: 7755; WAN02QB8Q; Start 341; Stop 365
ggcagtttctacacatatattcgca

SEQ ID NO: 476765 - DNA, 25 bp, Artificial
  probe
  misc_feature (1)..(25): SEQ ID NO: 7755; WAN02QB8Q; Start 72; Stop 96
atttcagtcagttgctcaatgtacc

SEQ ID NO: 476766 - DNA, 25 bp, Artificial
  probe
  misc_feature (1)..(25): SEQ ID NO: 7755; WAN02QB8Q; Start 603; Stop 627
cggcagaatgcttaatgaattacaa

SEQ ID NO: 476767 - DNA, 25 bp, Artificial
  probe
  misc_feature (1)..(25): SEQ ID NO: 7755; WAN02QB8Q; Start 604; Stop 628
ggcagaatgcttaatgaattacaac

SEQ ID NO: 476768 - DNA, 25 bp, Artificial
  probe
  misc_feature (1)..(25): SEQ ID NO: 7755; WAN02QB8Q; Start 601; Stop 625
gtcggcagaatgcttaatgaattac

SEQ ID NO: 476769 - DNA, 25 bp, Artificial
  probe
  misc_feature (1)..(25): SEQ ID NO: 7755; WAN02QB8Q; Start 602; Stop 626
tcggcagaatgcttaatgaattaca

SEQ ID NO: 476770 - DNA, 25 bp, Artificial
  probe
  misc_feature (1)..(25): SEQ ID NO: 7756; WAN02QB81; Start 130; Stop 154
tggcatacatcaatgaacaaggata

SEQ ID NO: 476771 - DNA, 25 bp, Artificial
  probe
  misc_feature (1)..(25): SEQ ID NO: 7756; WAN02QB81; Start 131; Stop 155
ggcatacatcaatgaacaaggataa

SEQ ID NO: 476772 - DNA, 25 bp, Artificial
  probe
  misc_feature (1)..(25): SEQ ID NO: 7756; WAN02QB81; Start 129; Stop 153
ttggcatacatcaatgaacaaggat

SEQ ID NO: 476773 - DNA, 25 bp, Artificial
  probe
  misc_feature (1)..(25): SEQ ID NO: 7756; WAN02QB81; Start 230; Stop 254
tagatccacctaacttgtatccgac

SEQ ID NO: 476774 - DNA, 25 bp, Artificial
  probe
  misc_feature (1)..(25): SEQ ID NO: 7756; WAN02QB81; Start 246; Stop 270
gtatccgacagtcaaggctatcatt

SEQ ID NO: 476775 - DNA, 25 bp, Artificial
  probe
  misc_feature (1)..(25): SEQ ID NO: 7756; WAN02QB81; Start 228; Stop 252
attagatccacctaacttgtatccg

SEQ ID NO: 476776 - DNA, 25 bp, Artificial
  probe
  misc_feature (1)..(25): SEQ ID NO: 7756; WAN02QB81; Start 229; Stop 253
ttagatccacctaacttgtatccga

SEQ ID NO: 476777 - DNA, 25 bp, Artificial
  probe
  misc_feature (1)..(25): SEQ ID NO: 7756; WAN02QB81; Start 59; Stop 83
tcaatagtaatgacagacaacatca

SEQ ID NO: 476778 - DNA, 25 bp, Artificial
  probe
  misc_feature (1)..(25): SEQ ID NO: 7756; WAN02QB81; Start 247; Stop 271
tatccgacagtcaaggctatcattg

SEQ ID NO: 476779 - DNA, 25 bp, Artificial
  probe
  misc_feature (1)..(25): SEQ ID NO: 7756; WAN02QB81; Start 73; Stop 97
agacaacatcaaacagataaggcta

SEQ ID NO: 476780 - DNA, 25 bp, Artificial
  probe
  misc_feature (1)..(25): SEQ ID NO: 7756; WAN02QB81; Start 70; Stop 94
gacagacaacatcaaacagataagg

SEQ ID NO: 476781 - DNA, 25 bp, Artificial
  probe
  misc_feature (1)..(25): SEQ ID NO: 7756; WAN02QB81; Start 286; Stop 310
gcaggtatttggacagatgataatc

SEQ ID NO: 476782 - DNA, 25 bp, Artificial
  probe
  misc_feature (1)..(25): SEQ ID NO: 7756; WAN02QB81; Start 53; Stop 77
tggttatcaatagtaatgacagaca

SEQ ID NO: 476783 - DNA, 25 bp, Artificial
  probe
  misc_feature (1)..(25): SEQ ID NO: 7756; WAN02QB81; Start 190; Stop 214
gaggttacagttacaatttacagcc

SEQ ID NO: 476784 - DNA, 25 bp, Artificial
  probe
  misc_feature (1)..(25): SEQ ID NO: 7756; WAN02QB81; Start 136; Stop 160
acatcaatgaacaaggataaaggga

SEQ ID NO: 476785 - DNA, 25 bp, Artificial
  probe
  misc_feature (1)..(25): SEQ ID NO: 7756; WAN02QB81; Start 137; Stop 161
catcaatgaacaaggataaagggag

SEQ ID NO: 476786 - DNA, 25 bp, Artificial
  probe
  misc_feature (1)..(25): SEQ ID NO: 7756; WAN02QB81; Start 74; Stop 98
gacaacatcaaacagataaggctaa

SEQ ID NO: 476787 - DNA, 25 bp, Artificial
  probe
  misc_feature (1)..(25): SEQ ID NO: 7756; WAN02QB81; Start 138; Stop 162
atcaatgaacaaggataaagggagg

SEQ ID NO: 476788 - DNA, 25 bp, Artificial
  probe
  misc_feature (1)..(25): SEQ ID NO: 7756; WAN02QB81; Start 236; Stop 260
cacctaacttgtatccgacagtcaa

SEQ ID NO: 476789 - DNA, 25 bp, Artificial
  probe
  misc_feature (1)..(25): SEQ ID NO: 7756; WAN02QB81; Start 124; Stop 148
gcttattggcatacatcaatgaaca

SEQ ID NO: 476790 - DNA, 25 bp, Artificial
  probe
  misc_feature (1)..(25): SEQ ID NO: 7756; WAN02QB81; Start 189; Stop 213
tgaggttacagttacaatttacagc

SEQ ID NO: 476791 - DNA, 25 bp, Artificial
  probe
  misc_feature (1)..(25): SEQ ID NO: 7756; WAN02QB81; Start 127; Stop 151
tattggcatacatcaatgaacaagg

SEQ ID NO: 476792 - DNA, 25 bp, Artificial
  probe
  misc_feature (1)..(25): SEQ ID NO: 7756; WAN02QB81; Start 60; Stop 84
caatagtaatgacagacaacatcaa

SEQ ID NO: 476793 - DNA, 25 bp, Artificial
  probe
  misc_feature (1)..(25): SEQ ID NO: 7756; WAN02QB81; Start 333; Stop 357
ctttgtttatggtggattaagcgag

SEQ ID NO: 476794 - DNA, 25 bp, Artificial
  probe
  misc_feature (1)..(25): SEQ ID NO: 7756; WAN02QB81; Start 75; Stop 99
acaacatcaaacagataaggctaaa

SEQ ID NO: 476795 - DNA, 25 bp, Artificial
  probe
  misc_feature (1)..(25): SEQ ID NO: 7756; WAN02QB81; Start 192; Stop 216
ggttacagttacaatttacagccct

SEQ ID NO: 476796 - DNA, 25 bp, Artificial
  probe
  misc_feature (1)..(25): SEQ ID NO: 7756; WAN02QB81; Start 191; Stop 215
aggttacagttacaatttacagccc

SEQ ID NO: 476797 - DNA, 25 bp, Artificial
  probe
  misc_feature (1)..(25): SEQ ID NO: 7756; WAN02QB81; Start 202; Stop 226
acaatttacagccctactaagtcta

SEQ ID NO: 476798 - DNA, 25 bp, Artificial
  probe
  misc_feature (1)..(25): SEQ ID NO: 7756; WAN02QB81; Start 201; Stop 225
tacaatttacagccctactaagtct

SEQ ID NO: 476799 - DNA, 25 bp, Artificial
  probe
  misc_feature (1)..(25): SEQ ID NO: 7756; WAN02QB81; Start 77; Stop 101
aacatcaaacagataaggctaaagt

SEQ ID NO: 476800 - DNA, 25 bp, Artificial
  probe
  misc_feature (1)..(25): SEQ ID NO: 7756; WAN02QB81; Start 72; Stop 96
cagacaacatcaaacagataaggct

SEQ ID NO: 476801 - DNA, 25 bp, Artificial
  probe
  misc_feature (1)..(25): SEQ ID NO: 7756; WAN02QB81; Start 337; Stop 361
gtttatggtggattaagcgaggaaa

SEQ ID NO: 476802 - DNA, 25 bp, Artificial
  probe
  misc_feature (1)..(25): SEQ ID NO: 7756; WAN02QB81; Start 128; Stop 152
attggcatacatcaatgaacaagga

SEQ ID NO: 476803 - DNA, 25 bp, Artificial
  probe
  misc_feature (1)..(25): SEQ ID NO: 7757; WAN02QBN8; Start 355; Stop 379
tctctgattaacgatataagcgaat

SEQ ID NO: 476804 - DNA, 25 bp, Artificial
  probe
  misc_feature (1)..(25): SEQ ID NO: 7757; WAN02QBN8; Start 354; Stop 378
atctctgattaacgatataagcgaa

SEQ ID NO: 476805 - DNA, 25 bp, Artificial
  probe
  misc_feature (1)..(25): SEQ ID NO: 7757; WAN02QBN8; Start 356; Stop 380
ctctgattaacgatataagcgaatt

SEQ ID NO: 476806 - DNA, 25 bp, Artificial
  probe
  misc_feature (1)..(25): SEQ ID NO: 7757; WAN02QBN8; Start 55; Stop 79
gaagttgatcgtttgaaagaagaga

SEQ ID NO: 476807 - DNA, 25 bp, Artificial
  probe
  misc_feature (1)..(25): SEQ ID NO: 7757; WAN02QBN8; Start 54; Stop 78
agaagttgatcgtttgaaagaagag

SEQ ID NO: 476808 - DNA, 25 bp, Artificial
  probe
  misc_feature (1)..(25): SEQ ID NO: 7757; WAN02QBN8; Start 337; Stop 361
tctgaagggtatgaattatctctga

SEQ ID NO: 476809 - DNA, 25 bp, Artificial
  probe
  misc_feature (1)..(25): SEQ ID NO: 7757; WAN02QBN8; Start 56; Stop 80
aagttgatcgtttgaaagaagagaa

SEQ ID NO: 476810 - DNA, 25 bp, Artificial
  probe
  misc_feature (1)..(25): SEQ ID NO: 7757; WAN02QBN8; Start 53; Stop 77
aagaagttgatcgtttgaaagaaga

SEQ ID NO: 476811 - DNA, 25 bp, Artificial
  probe
  misc_feature (1)..(25): SEQ ID NO: 7757; WAN02QBN8; Start 57; Stop 81
agttgatcgtttgaaagaagagaat

SEQ ID NO: 476812 - DNA, 25 bp, Artificial
  probe
  misc_feature (1)..(25): SEQ ID NO: 7757; WAN02QBN8; Start 336; Stop 360
ctctgaagggtatgaattatctctg

SEQ ID NO: 476813 - DNA, 25 bp, Artificial
  probe
  misc_feature (1)..(25): SEQ ID NO: 7757; WAN02QBN8; Start 353; Stop 377
tatctctgattaacgatataagcga

SEQ ID NO: 476814 - DNA, 25 bp, Artificial
  probe
  misc_feature (1)..(25): SEQ ID NO: 7757; WAN02QBN8; Start 58; Stop 82
gttgatcgtttgaaagaagagaatc

SEQ ID NO: 476815 - DNA, 25 bp, Artificial
  probe
  misc_feature (1)..(25): SEQ ID NO: 7757; WAN02QBN8; Start 361; Stop 385
attaacgatataagcgaattacagt

SEQ ID NO: 476816 - DNA, 25 bp, Artificial
  probe
  misc_feature (1)..(25): SEQ ID NO: 7757; WAN02QBN8; Start 359; Stop 383
tgattaacgatataagcgaattaca

SEQ ID NO: 476817 - DNA, 25 bp, Artificial
  probe
  misc_feature (1)..(25): SEQ ID NO: 7757; WAN02QBN8; Start 52; Stop 76
aaagaagttgatcgtttgaaagaag

SEQ ID NO: 476818 - DNA, 25 bp, Artificial
  probe
  misc_feature (1)..(25): SEQ ID NO: 7757; WAN02QBN8; Start 24; Stop 48
acatgaacaacaatttgatcgtttg

SEQ ID NO: 476819 - DNA, 25 bp, Artificial
  probe
  misc_feature (1)..(25): SEQ ID NO: 7757; WAN02QBN8; Start 23; Stop 47
cacatgaacaacaatttgatcgttt

SEQ ID NO: 476820 - DNA, 25 bp, Artificial
  probe
  misc_feature (1)..(25): SEQ ID NO: 7757; WAN02QBN8; Start 22; Stop 46
acacatgaacaacaatttgatcgtt

SEQ ID NO: 476821 - DNA, 25 bp, Artificial
  probe
  misc_feature (1)..(25): SEQ ID NO: 7757; WAN02QBN8; Start 25; Stop 49
catgaacaacaatttgatcgtttga

SEQ ID NO: 476822 - DNA, 25 bp, Artificial
  probe
  misc_feature (1)..(25): SEQ ID NO: 7757; WAN02QBN8; Start 59; Stop 83
ttgatcgtttgaaagaagagaatct

SEQ ID NO: 476823 - DNA, 25 bp, Artificial
  probe
  misc_feature (1)..(25): SEQ ID NO: 7757; WAN02QBN8; Start 21; Stop 45
gacacatgaacaacaatttgatcgt

SEQ ID NO: 476824 - DNA, 25 bp, Artificial
  probe
  misc_feature (1)..(25): SEQ ID NO: 7757; WAN02QBN8; Start 17; Stop 41
tagggacacatgaacaacaatttga

SEQ ID NO: 476825 - DNA, 25 bp, Artificial
  probe
  misc_feature (1)..(25): SEQ ID NO: 7757; WAN02QBN8; Start 16; Stop 40
gtagggacacatgaacaacaatttg

SEQ ID NO: 476826 - DNA, 25 bp, Artificial
  probe
  misc_feature (1)..(25): SEQ ID NO: 7757; WAN02QBN8; Start 335; Stop 359
cctctgaagggtatgaattatctct

SEQ ID NO: 476827 - DNA, 25 bp, Artificial
  probe
  misc_feature (1)..(25): SEQ ID NO: 7757; WAN02QBN8; Start 334; Stop 358
tcctctgaagggtatgaattatctc

SEQ ID NO: 476828 - DNA, 25 bp, Artificial
  probe
  misc_feature (1)..(25): SEQ ID NO: 7757; WAN02QBN8; Start 74; Stop 98
aagagaatctaattcaagaggaagt

SEQ ID NO: 476829 - DNA, 25 bp, Artificial
  probe
  misc_feature (1)..(25): SEQ ID NO: 7757; WAN02QBN8; Start 19; Stop 43
gggacacatgaacaacaatttgatc

SEQ ID NO: 476830 - DNA, 25 bp, Artificial
  probe
  misc_feature (1)..(25): SEQ ID NO: 7757; WAN02QBN8; Start 26; Stop 50
atgaacaacaatttgatcgtttgat

SEQ ID NO: 476831 - DNA, 25 bp, Artificial
  probe
  misc_feature (1)..(25): SEQ ID NO: 7757; WAN02QBN8; Start 338; Stop 362
ctgaagggtatgaattatctctgat

SEQ ID NO: 476832 - DNA, 25 bp, Artificial
  probe
  misc_feature (1)..(25): SEQ ID NO: 7757; WAN02QBN8; Start 18; Stop 42
agggacacatgaacaacaatttgat

SEQ ID NO: 476833 - DNA, 25 bp, Artificial
  probe
  misc_feature (1)..(25): SEQ ID NO: 7757; WAN02QBN8; Start 366; Stop 390
cgatataagcgaattacagtatagt

SEQ ID NO: 476834 - DNA, 25 bp, Artificial
  probe
  misc_feature (1)..(25): SEQ ID NO: 7757; WAN02QBN8; Start 365; Stop 389
acgatataagcgaattacagtatag

SEQ ID NO: 476835 - DNA, 25 bp, Artificial
  probe
  misc_feature (1)..(25): SEQ ID NO: 7757; WAN02QBN8; Start 90; Stop 114
agaggaagtatttattcaaacagga

SEQ ID NO: 476836 - DNA, 25 bp, Artificial
  probe
  misc_feature (1)..(25): SEQ ID NO: ; BIOB3_at; Start 183; Stop 207
aagaagataaagacctgcaactgtt

SEQ ID NO: 476837 - DNA, 25 bp, Artificial
  probe
  misc_feature (1)..(25): SEQ ID NO: ; BIOB3_at; Start 182; Stop 206
gaagaagataaagacctgcaactgt

SEQ ID NO: 476838 - DNA, 25 bp, Artificial
  probe
  misc_feature (1)..(25): SEQ ID NO: ; BIOB3_at; Start 184; Stop 208
agaagataaagacctgcaactgttc

SEQ ID NO: 476839 - DNA, 25 bp, Artificial
  probe
  misc_feature (1)..(25): SEQ ID NO: ; BIOB3_at; Start 181; Stop 205
ggaagaagataaagacctgcaactg

SEQ ID NO: 476840 - DNA, 25 bp, Artificial
  probe
  misc_feature (1)..(25): SEQ ID NO: ; BIOB3_at; Start 185; Stop 209
gaagataaagacctgcaactgttcc

SEQ ID NO: 476841 - DNA, 25 bp, Artificial
  probe
  misc_feature (1)..(25): SEQ ID NO: ; BIOB3_at; Start 11; Stop 35
gcctttgattttattcgcaccattg

SEQ ID NO: 476842 - DNA, 25 bp, Artificial
  probe
  misc_feature (1)..(25): SEQ ID NO: ; BIOB3_at; Start 180; Stop 204
cggaagaagataaagacctgcaact

SEQ ID NO: 476843 - DNA, 25 bp, Artificial
  probe
  misc_feature (1)..(25): SEQ ID NO: ; BIOB3_at; Start 308; Stop 332
gaatattacaacgcggcagcattat

SEQ ID NO: 476844 - DNA, 25 bp, Artificial
  probe
  misc_feature (1)..(25): SEQ ID NO: ; BIOB3_at; Start 309; Stop 333
aatattacaacgcggcagcattatg

SEQ ID NO: 476845 - DNA, 25 bp, Artificial
  probe
  misc_feature (1)..(25): SEQ ID NO: ; BIOB3_at; Start 1; Stop 25
tgatgtcgatgcctttgattttatt

SEQ ID NO: 476846 - DNA, 25 bp, Artificial
  probe
  misc_feature (1)..(25): SEQ ID NO: ; BIOB3_at; Start 186; Stop 210
aagataaagacctgcaactgttccg

SEQ ID NO: 476847 - DNA, 25 bp, Artificial
  probe
  misc_feature (1)..(25): SEQ ID NO: ; BIOB3_at; Start 2; Stop 26
gatgtcgatgcctttgattttattc

SEQ ID NO: 476848 - DNA, 25 bp, Artificial
  probe
  misc_feature (1)..(25): SEQ ID NO: ; BIOB3_at; Start 254; Stop 278
gataacgaacaacagcaacgtcttg

SEQ ID NO: 476849 - DNA, 25 bp, Artificial
  probe
  misc_feature (1)..(25): SEQ ID NO: ; BIOB3_at; Start 310; Stop 334
atattacaacgcggcagcattatga

SEQ ID NO: 476850 - DNA, 25 bp, Artificial
  probe
  misc_feature (1)..(25): SEQ ID NO: ; BIOB3_at; Start 255; Stop 279
ataacgaacaacagcaacgtcttga

SEQ ID NO: 476851 - DNA, 25 bp, Artificial
  probe
  misc_feature (1)..(25): SEQ ID NO: ; BIOB3_at; Start 256; Stop 280
taacgaacaacagcaacgtcttgaa

SEQ ID NO: 476852 - DNA, 25 bp, Artificial
  probe
  misc_feature (1)..(25): SEQ ID NO: ; BIOB3_at; Start 102; Stop 126
aacagactcaggcgatgtgctttat

SEQ ID NO: 476853 - DNA, 25 bp, Artificial
  probe
  misc_feature (1)..(25): SEQ ID NO: ; BIOB3_at; Start 260; Stop 284
gaacaacagcaacgtcttgaacagg

SEQ ID NO: 476854 - DNA, 25 bp, Artificial
  probe
  misc_feature (1)..(25): SEQ ID NO: ; BIOB3_at; Start 179; Stop 203
ccggaagaagataaagacctgcaac

SEQ ID NO: 476855 - DNA, 25 bp, Artificial
  probe
  misc_feature (1)..(25): SEQ ID NO: ; BIOB3_at; Start 3; Stop 27
atgtcgatgcctttgattttattcg

SEQ ID NO: 476856 - DNA, 25 bp, Artificial
  probe
  misc_feature (1)..(25): SEQ ID NO: ; BIOB3_at; Start 253; Stop 277
ggataacgaacaacagcaacgtctt

SEQ ID NO: 476857 - DNA, 25 bp, Artificial
  probe
  misc_feature (1)..(25): SEQ ID NO: ; BIOB3_at; Start 12; Stop 36
cctttgattttattcgcaccattgc

SEQ ID NO: 476858 - DNA, 25 bp, Artificial
  probe
  misc_feature (1)..(25): SEQ ID NO: ; BIOB3_at; Start 9; Stop 33
atgcctttgattttattcgcaccat

SEQ ID NO: 476859 - DNA, 25 bp, Artificial
  probe
  misc_feature (1)..(25): SEQ ID NO: ; BIOB3_at; Start 10; Stop 34
tgcctttgattttattcgcaccatt

SEQ ID NO: 476860 - DNA, 25 bp, Artificial
  probe
  misc_feature (1)..(25): SEQ ID NO: ; BIOB3_at; Start 101; Stop 125
gaacagactcaggcgatgtgcttta

SEQ ID NO: 476861 - DNA, 25 bp, Artificial
  probe
  misc_feature (1)..(25): SEQ ID NO: ; BIOB3_at; Start 307; Stop 331
cgaatattacaacgcggcagcatta

SEQ ID NO: 476862 - DNA, 25 bp, Artificial
  probe
  misc_feature (1)..(25): SEQ ID NO: ; BIOB3_at; Start 8; Stop 32
gatgcctttgattttattcgcacca

SEQ ID NO: 476863 - DNA, 25 bp, Artificial
  probe
  misc_feature (1)..(25): SEQ ID NO: ; BIOB3_at; Start 4; Stop 28
tgtcgatgcctttgattttattcgc

SEQ ID NO: 476864 - DNA, 25 bp, Artificial
  probe
  misc_feature (1)..(25): SEQ ID NO: ; BIOB3_at; Start 257; Stop 281
aacgaacaacagcaacgtcttgaac

SEQ ID NO: 476865 - DNA, 25 bp, Artificial
  probe
  misc_feature (1)..(25): SEQ ID NO: ; BIOB3_at; Start 6; Stop 30
tcgatgcctttgattttattcgcac

SEQ ID NO: 476866 - DNA, 25 bp, Artificial
  probe
  misc_feature (1)..(25): SEQ ID NO: ; BIOB3_at; Start 5; Stop 29
gtcgatgcctttgattttattcgca

SEQ ID NO: 476867 - DNA, 25 bp, Artificial
  probe
  misc_feature (1)..(25): SEQ ID NO: ; BIOB3_at; Start 7; Stop 31
cgatgcctttgattttattcgcacc

SEQ ID NO: 476868 - DNA, 25 bp, Artificial
  probe
  misc_feature (1)..(25): SEQ ID NO: ; BIOB3_at; Start 136; Stop 160
aaactcgattttctacggttgcaaa

SEQ ID NO: 476869 - DNA, 25 bp, Artificial
  probe
  misc_feature (1)..(25): SEQ ID NO: ; BIOB5_at; Start 23; Stop 47
cattgtcgcaagtcacagaattatt

SEQ ID NO: 476870 - DNA, 25 bp, Artificial
  probe
  misc_feature (1)..(25): SEQ ID NO: ; BIOB5_at; Start 22; Stop 46
acattgtcgcaagtcacagaattat

SEQ ID NO: 476871 - DNA, 25 bp, Artificial
  probe
  misc_feature (1)..(25): SEQ ID NO: ; BIOB5_at; Start 28; Stop 52
tcgcaagtcacagaattatttgaaa

SEQ ID NO: 476872 - DNA, 25 bp, Artificial
  probe
  misc_feature (1)..(25): SEQ ID NO: ; BIOB5_at; Start 27; Stop 51
gtcgcaagtcacagaattatttgaa

SEQ ID NO: 476873 - DNA, 25 bp, Artificial
  probe
  misc_feature (1)..(25): SEQ ID NO: ; BIOB5_at; Start 21; Stop 45
gacattgtcgcaagtcacagaatta

SEQ ID NO: 476874 - DNA, 25 bp, Artificial
  probe
  misc_feature (1)..(25): SEQ ID NO: ; BIOB5_at; Start 24; Stop 48
attgtcgcaagtcacagaattattt

SEQ ID NO: 476875 - DNA, 25 bp, Artificial
  probe
  misc_feature (1)..(25): SEQ ID NO: ; BIOB5_at; Start 25; Stop 49
ttgtcgcaagtcacagaattatttg

SEQ ID NO: 476876 - DNA, 25 bp, Artificial
  probe
  misc_feature (1)..(25): SEQ ID NO: ; BIOB5_at; Start 26; Stop 50
tgtcgcaagtcacagaattatttga

SEQ ID NO: 476877 - DNA, 25 bp, Artificial
  probe
  misc_feature (1)..(25): SEQ ID NO: ; BIOB5_at; Start 29; Stop 53
cgcaagtcacagaattatttgaaaa

SEQ ID NO: 476878 - DNA, 25 bp, Artificial
  probe
  misc_feature (1)..(25): SEQ ID NO: ; BIOB5_at; Start 222; Stop 246
gttgatggaagttgaacaggtgctg

SEQ ID NO: 476879 - DNA, 25 bp, Artificial
  probe
  misc_feature (1)..(25): SEQ ID NO: ; BIOB5_at; Start 20; Stop 44
ggacattgtcgcaagtcacagaatt

SEQ ID NO: 476880 - DNA, 25 bp, Artificial
  probe
  misc_feature (1)..(25): SEQ ID NO: ; BIOB5_at; Start 19; Stop 43
tggacattgtcgcaagtcacagaat

SEQ ID NO: 476881 - DNA, 25 bp, Artificial
  probe
  misc_feature (1)..(25): SEQ ID NO: ; BIOB5_at; Start 164; Stop 188
aagattgcaaatactgcccgcaaag

SEQ ID NO: 476882 - DNA, 25 bp, Artificial
  probe
  misc_feature (1)..(25): SEQ ID NO: ; BIOB5_at; Start 163; Stop 187
gaagattgcaaatactgcccgcaaa

SEQ ID NO: 476883 - DNA, 25 bp, Artificial
  probe
  misc_feature (1)..(25): SEQ ID NO: ; BIOBM_at; Start 133; Stop 157
aatatcatcaccacacgcacttatc

SEQ ID NO: 476884 - DNA, 25 bp, Artificial
  probe
  misc_feature (1)..(25): SEQ ID NO: ; BIOBM_at; Start 132; Stop 156
caatatcatcaccacacgcacttat

SEQ ID NO: 476885 - DNA, 25 bp, Artificial
  probe
  misc_feature (1)..(25): SEQ ID NO: ; BIOBM_at; Start 134; Stop 158
atatcatcaccacacgcacttatca

SEQ ID NO: 476886 - DNA, 25 bp, Artificial
  probe
  misc_feature (1)..(25): SEQ ID NO: ; BIOBM_at; Start 135; Stop 159
tatcatcaccacacgcacttatcag

SEQ ID NO: 476887 - DNA, 25 bp, Artificial
  probe
  misc_feature (1)..(25): SEQ ID NO: ; BIOBM_at; Start 88; Stop 112
gattactacaaccacaacctggaca

SEQ ID NO: 476888 - DNA, 25 bp, Artificial
  probe
  misc_feature (1)..(25): SEQ ID NO: ; BIOBM_at; Start 131; Stop 155
gcaatatcatcaccacacgcactta

SEQ ID NO: 476889 - DNA, 25 bp, Artificial
  probe
  misc_feature (1)..(25): SEQ ID NO: ; BIOBM_at; Start 89; Stop 113
attactacaaccacaacctggacac

SEQ ID NO: 476890 - DNA, 25 bp, Artificial
  probe
  misc_feature (1)..(25): SEQ ID NO: ; BIOBM_at; Start 87; Stop 111
ggattactacaaccacaacctggac

SEQ ID NO: 476891 - DNA, 25 bp, Artificial
  probe
  misc_feature (1)..(25): SEQ ID NO: ; BIOBM_at; Start 85; Stop 109
ctggattactacaaccacaacctgg

SEQ ID NO: 476892 - DNA, 25 bp, Artificial
  probe
  misc_feature (1)..(25): SEQ ID NO: ; BIOBM_at; Start 86; Stop 110
tggattactacaaccacaacctgga

SEQ ID NO: 476893 - DNA, 25 bp, Artificial
  probe
  misc_feature (1)..(25): SEQ ID NO: ; BIOBM_at; Start 84; Stop 108
gctggattactacaaccacaacctg

SEQ ID NO: 476894 - DNA, 25 bp, Artificial
  probe
  misc_feature (1)..(25): SEQ ID NO: ; BIOBM_at; Start 305; Stop 329
caatcaacatgctggtgaaggtgaa

SEQ ID NO: 476895 - DNA, 25 bp, Artificial
  probe
  misc_feature (1)..(25): SEQ ID NO: ; BIOBM_at; Start 125; Stop 149
tttacggcaatatcatcaccacacg

SEQ ID NO: 476896 - DNA, 25 bp, Artificial
  probe
  misc_feature (1)..(25): SEQ ID NO: ; BIOBM_at; Start 121; Stop 145
gagttttacggcaatatcatcacca

SEQ ID NO: 476897 - DNA, 25 bp, Artificial
  probe
  misc_feature (1)..(25): SEQ ID NO: ; BIOBM_at; Start 122; Stop 146
agttttacggcaatatcatcaccac

SEQ ID NO: 476898 - DNA, 25 bp, Artificial
  probe
  misc_feature (1)..(25): SEQ ID NO: ; BIOBM_at; Start 124; Stop 148
ttttacggcaatatcatcaccacac

SEQ ID NO: 476899 - DNA, 25 bp, Artificial
  probe
  misc_feature (1)..(25): SEQ ID NO: ; BIOBM_at; Start 123; Stop 147
gttttacggcaatatcatcaccaca

SEQ ID NO: 476900 - DNA, 25 bp, Artificial
  probe
  misc_feature (1)..(25): SEQ ID NO: ; BIOBM_at; Start 120; Stop 144
ggagttttacggcaatatcatcacc

SEQ ID NO: 476901 - DNA, 25 bp, Artificial
  probe
  misc_feature (1)..(25): SEQ ID NO: ; BIOBM_at; Start 136; Stop 160
atcatcaccacacgcacttatcagg

SEQ ID NO: 476902 - DNA, 25 bp, Artificial
  probe
  misc_feature (1)..(25): SEQ ID NO: ; BIOBM_at; Start 306; Stop 330
aatcaacatgctggtgaaggtgaaa

SEQ ID NO: 476903 - DNA, 25 bp, Artificial
  probe
  misc_feature (1)..(25): SEQ ID NO: ; BIOBM_at; Start 119; Stop 143
cggagttttacggcaatatcatcac

SEQ ID NO: 476904 - DNA, 25 bp, Artificial
  probe
  misc_feature (1)..(25): SEQ ID NO: ; BIOBM_at; Start 139; Stop 163
atcaccacacgcacttatcaggaac

SEQ ID NO: 476905 - DNA, 25 bp, Artificial
  probe
  misc_feature (1)..(25): SEQ ID NO: ; BIOBM_at; Start 138; Stop 162
catcaccacacgcacttatcaggaa

SEQ ID NO: 476906 - DNA, 25 bp, Artificial
  probe
  misc_feature (1)..(25): SEQ ID NO: ; BIOBM_at; Start 90; Stop 114
ttactacaaccacaacctggacacc

SEQ ID NO: 476907 - DNA, 25 bp, Artificial
  probe
  misc_feature (1)..(25): SEQ ID NO: ; BIOBM_at; Start 83; Stop 107
ggctggattactacaaccacaacct

SEQ ID NO: 476908 - DNA, 25 bp, Artificial
  probe
  misc_feature (1)..(25): SEQ ID NO: ; BIOBM_at; Start 307; Stop 331
atcaacatgctggtgaaggtgaaag

SEQ ID NO: 476909 - DNA, 25 bp, Artificial
  probe
  misc_feature (1)..(25): SEQ ID NO: ; BIOBM_at; Start 91; Stop 115
tactacaaccacaacctggacacct

SEQ ID NO: 476910 - DNA, 25 bp, Artificial
  probe
  misc_feature (1)..(25): SEQ ID NO: ; BIOBM_at; Start 150; Stop 174
cacttatcaggaacgcctcgatacg

SEQ ID NO: 476911 - DNA, 25 bp, Artificial
  probe
  misc_feature (1)..(25): SEQ ID NO: ; BIOBM_at; Start 226; Stop 250
ggcttaggcgaaacggtaaaagatc

SEQ ID NO: 476912 - DNA, 25 bp, Artificial
  probe
  misc_feature (1)..(25): SEQ ID NO: ; BIOBM_at; Start 227; Stop 251
gcttaggcgaaacggtaaaagatcg

SEQ ID NO: 476913 - DNA, 25 bp, Artificial
  probe
  misc_feature (1)..(25): SEQ ID NO: ; BIOBM_at; Start 118; Stop 142
ccggagttttacggcaatatcatca

SEQ ID NO: 476914 - DNA, 25 bp, Artificial
  probe
  misc_feature (1)..(25): SEQ ID NO: ; BIOBM_at; Start 240; Stop 264
ggtaaaagatcgcgccggattattg

SEQ ID NO: 476915 - DNA, 25 bp, Artificial
  probe
  misc_feature (1)..(25): SEQ ID NO: ; BIOBM_at; Start 257; Stop 281
gattattgctgcaactggcaaacct

SEQ ID NO: 476916 - DNA, 25 bp, Artificial
  probe
  misc_feature (1)..(25): SEQ ID NO: ; BIOBM_at; Start 258; Stop 282
attattgctgcaactggcaaacctg

SEQ ID NO: 476917 - DNA, 25 bp, Artificial
  probe
  misc_feature (1)..(25): SEQ ID NO: ; BIOC3_at; Start 119; Stop 143
tgcattatcaacatcatattcagcc

SEQ ID NO: 476918 - DNA, 25 bp, Artificial
  probe
  misc_feature (1)..(25): SEQ ID NO: ; BIOC3_at; Start 116; Stop 140
gcgtgcattatcaacatcatattca

SEQ ID NO: 476919 - DNA, 25 bp, Artificial
  probe
  misc_feature (1)..(25): SEQ ID NO: ; BIOC3_at; Start 124; Stop 148
tatcaacatcatattcagcccatca

SEQ ID NO: 476920 - DNA, 25 bp, Artificial
  probe
  misc_feature (1)..(25): SEQ ID NO: ; BIOC3_at; Start 120; Stop 144
gcattatcaacatcatattcagccc

SEQ ID NO: 476921 - DNA, 25 bp, Artificial
  probe
  misc_feature (1)..(25): SEQ ID NO: ; BIOC3_at; Start 121; Stop 145
cattatcaacatcatattcagccca

SEQ ID NO: 476922 - DNA, 25 bp, Artificial
  probe
  misc_feature (1)..(25): SEQ ID NO: ; BIOC3_at; Start 118; Stop 142
gtgcattatcaacatcatattcagc

SEQ ID NO: 476923 - DNA, 25 bp, Artificial
  probe
  misc_feature (1)..(25): SEQ ID NO: ; BIOC3_at; Start 115; Stop 139
ggcgtgcattatcaacatcatattc

SEQ ID NO: 476924 - DNA, 25 bp, Artificial
  probe
  misc_feature (1)..(25): SEQ ID NO: ; BIOC3_at; Start 123; Stop 147
ttatcaacatcatattcagcccatc

SEQ ID NO: 476925 - DNA, 25 bp, Artificial
  probe
  misc_feature (1)..(25): SEQ ID NO: ; BIOC3_at; Start 117; Stop 141
cgtgcattatcaacatcatattcag

SEQ ID NO: 476926 - DNA, 25 bp, Artificial
  probe
  misc_feature (1)..(25): SEQ ID NO: ; BIOC3_at; Start 125; Stop 149
atcaacatcatattcagcccatcac

SEQ ID NO: 476927 - DNA, 25 bp, Artificial
  probe
  misc_feature (1)..(25): SEQ ID NO: ; BIOC3_at; Start 122; Stop 146
attatcaacatcatattcagcccat

SEQ ID NO: 476928 - DNA, 25 bp, Artificial
  probe
  misc_feature (1)..(25): SEQ ID NO: ; BIOC3_at; Start 114; Stop 138
cggcgtgcattatcaacatcatatt

SEQ ID NO: 476929 - DNA, 25 bp, Artificial
  probe
  misc_feature (1)..(25): SEQ ID NO: ; BIOC3_at; Start 291; Stop 315
gcgatatcctctgacgtatcatctt

SEQ ID NO: 476930 - DNA, 25 bp, Artificial
  probe
  misc_feature (1)..(25): SEQ ID NO: ; BIOC3_at; Start 113; Stop 137
acggcgtgcattatcaacatcatat

SEQ ID NO: 476931 - DNA, 25 bp, Artificial
  probe
  misc_feature (1)..(25): SEQ ID NO: ; BIOC3_at; Start 126; Stop 150
tcaacatcatattcagcccatcacg

SEQ ID NO: 476932 - DNA, 25 bp, Artificial
  probe
  misc_feature (1)..(25): SEQ ID NO: ; BIOC3_at; Start 292; Stop 316
cgatatcctctgacgtatcatcttt

SEQ ID NO: 476933 - DNA, 25 bp, Artificial
  probe
  misc_feature (1)..(25): SEQ ID NO: ; BIOC3_at; Start 112; Stop 136
aacggcgtgcattatcaacatcata

SEQ ID NO: 476934 - DNA, 25 bp, Artificial
  probe
  misc_feature (1)..(25): SEQ ID NO: ; BIOC3_at; Start 290; Stop 314
ggcgatatcctctgacgtatcatct

SEQ ID NO: 476935 - DNA, 25 bp, Artificial
  probe
  misc_feature (1)..(25): SEQ ID NO: ; BIOC3_at; Start 111; Stop 135
gaacggcgtgcattatcaacatcat

SEQ ID NO: 476936 - DNA, 25 bp, Artificial
  probe
  misc_feature (1)..(25): SEQ ID NO: ; BIOC3_at; Start 81; Stop 105
tttaccgccagatgaaatcgaacag

SEQ ID NO: 476937 - DNA, 25 bp, Artificial
  probe
  misc_feature (1)..(25): SEQ ID NO: ; BIOC3_at; Start 127; Stop 151
caacatcatattcagcccatcacgc

SEQ ID NO: 476938 - DNA, 25 bp, Artificial
  probe
  misc_feature (1)..(25): SEQ ID NO: ; BIOC3_at; Start 109; Stop 133
ctgaacggcgtgcattatcaacatc

SEQ ID NO: 476939 - DNA, 25 bp, Artificial
  probe
  misc_feature (1)..(25): SEQ ID NO: ; BIOC3_at; Start 293; Stop 317
gatatcctctgacgtatcatctttt

SEQ ID NO: 476940 - DNA, 25 bp, Artificial
  probe
  misc_feature (1)..(25): SEQ ID NO: ; BIOC3_at; Start 82; Stop 106
ttaccgccagatgaaatcgaacagt

SEQ ID NO: 476941 - DNA, 25 bp, Artificial
  probe
  misc_feature (1)..(25): SEQ ID NO: ; BIOC3_at; Start 90; Stop 114
agatgaaatcgaacagtcgctgaac

SEQ ID NO: 476942 - DNA, 25 bp, Artificial
  probe
  misc_feature (1)..(25): SEQ ID NO: ; BIOC3_at; Start 89; Stop 113
cagatgaaatcgaacagtcgctgaa

SEQ ID NO: 476943 - DNA, 25 bp, Artificial
  probe
  misc_feature (1)..(25): SEQ ID NO: ; BIOC3_at; Start 80; Stop 104
ttttaccgccagatgaaatcgaaca

SEQ ID NO: 476944 - DNA, 25 bp, Artificial
  probe
  misc_feature (1)..(25): SEQ ID NO: ; BIOC3_at; Start 289; Stop 313
gggcgatatcctctgacgtatcatc

SEQ ID NO: 476945 - DNA, 25 bp, Artificial
  probe
  misc_feature (1)..(25): SEQ ID NO: ; BIOC3_at; Start 83; Stop 107
taccgccagatgaaatcgaacagtc

SEQ ID NO: 476946 - DNA, 25 bp, Artificial
  probe
  misc_feature (1)..(25): SEQ ID NO: ; BIOC3_at; Start 128; Stop 152
aacatcatattcagcccatcacgct

SEQ ID NO: 476947 - DNA, 25 bp, Artificial
  probe
  misc_feature (1)..(25): SEQ ID NO: ; BIOC3_at; Start 91; Stop 115
gatgaaatcgaacagtcgctgaacg

SEQ ID NO: 476948 - DNA, 25 bp, Artificial
  probe
  misc_feature (1)..(25): SEQ ID NO: ; BIOC5_at; Start 5; Stop 29
caacggttaataaacaagccattgc

SEQ ID NO: 476949 - DNA, 25 bp, Artificial
  probe
  misc_feature (1)..(25): SEQ ID NO: ; BIOC5_at; Start 4; Stop 28
gcaacggttaataaacaagccattg

SEQ ID NO: 476950 - DNA, 25 bp, Artificial
  probe
  misc_feature (1)..(25): SEQ ID NO: ; BIOC5_at; Start 6; Stop 30
aacggttaataaacaagccattgca

SEQ ID NO: 476951 - DNA, 25 bp, Artificial
  probe
  misc_feature (1)..(25): SEQ ID NO: ; BIOC5_at; Start 7; Stop 31
acggttaataaacaagccattgcag

SEQ ID NO: 476952 - DNA, 25 bp, Artificial
  probe
  misc_feature (1)..(25): SEQ ID NO: ; BIOC5_at; Start 57; Stop 81
ctatgagcaacatgcagatctacag

SEQ ID NO: 476953 - DNA, 25 bp, Artificial
  probe
  misc_feature (1)..(25): SEQ ID NO: ; BIOC5_at; Start 55; Stop 79
cactatgagcaacatgcagatctac

SEQ ID NO: 476954 - DNA, 25 bp, Artificial
  probe
  misc_feature (1)..(25): SEQ ID NO: ; BIOC5_at; Start 56; Stop 80
actatgagcaacatgcagatctaca

SEQ ID NO: 476955 - DNA, 25 bp, Artificial
  probe
  misc_feature (1)..(25): SEQ ID NO: ; BIOC5_at; Start 54; Stop 78
acactatgagcaacatgcagatcta

SEQ ID NO: 476956 - DNA, 25 bp, Artificial
  probe
  misc_feature (1)..(25): SEQ ID NO: ; BIOC5_at; Start 107; Stop 131
caatgcttccacagcgtaaatacac

SEQ ID NO: 476957 - DNA, 25 bp, Artificial
  probe
  misc_feature (1)..(25): SEQ ID NO: ; BIOC5_at; Start 10; Stop 34
gttaataaacaagccattgcagcgg

SEQ ID NO: 476958 - DNA, 25 bp, Artificial
  probe
  misc_feature (1)..(25): SEQ ID NO: ; BIOC5_at; Start 9; Stop 33
ggttaataaacaagccattgcagcg

SEQ ID NO: 476959 - DNA, 25 bp, Artificial
  probe
  misc_feature (1)..(25): SEQ ID NO: ; BIOC5_at; Start 8; Stop 32
cggttaataaacaagccattgcagc

SEQ ID NO: 476960 - DNA, 25 bp, Artificial
  probe
  misc_feature (1)..(25): SEQ ID NO: ; BIOC5_at; Start 58; Stop 82
tatgagcaacatgcagatctacagc

SEQ ID NO: 476961 - DNA, 25 bp, Artificial
  probe
  misc_feature (1)..(25): SEQ ID NO: ; BIOC5_at; Start 108; Stop 132
aatgcttccacagcgtaaatacacc

SEQ ID NO: 476962 - DNA, 25 bp, Artificial
  probe
  misc_feature (1)..(25): SEQ ID NO: ; BIOC5_at; Start 53; Stop 77
cacactatgagcaacatgcagatct

SEQ ID NO: 476963 - DNA, 25 bp, Artificial
  probe
  misc_feature (1)..(25): SEQ ID NO: ; BIOC5_at; Start 263; Stop 287
attatctggcgggagatatcgaatc

SEQ ID NO: 476964 - DNA, 25 bp, Artificial
  probe
  misc_feature (1)..(25): SEQ ID NO: ; BIOC5_at; Start 262; Stop 286
cattatctggcgggagatatcgaat

SEQ ID NO: 476965 - DNA, 25 bp, Artificial
  probe
  misc_feature (1)..(25): SEQ ID NO: ; BIOC5_at; Start 3; Stop 27
ggcaacggttaataaacaagccatt

SEQ ID NO: 476966 - DNA, 25 bp, Artificial
  probe
  misc_feature (1)..(25): SEQ ID NO: ; BIOC5_at; Start 106; Stop 130
gcaatgcttccacagcgtaaataca

SEQ ID NO: 476967 - DNA, 25 bp, Artificial
  probe
  misc_feature (1)..(25): SEQ ID NO: ; BIOC5_at; Start 52; Stop 76
gcacactatgagcaacatgcagatc

SEQ ID NO: 476968 - DNA, 25 bp, Artificial
  probe
  misc_feature (1)..(25): SEQ ID NO: ; BIOC5_at; Start 257; Stop 281
cagaccattatctggcgggagatat

SEQ ID NO: 476969 - DNA, 25 bp, Artificial
  probe
  misc_feature (1)..(25): SEQ ID NO: ; BIOC5_at; Start 274; Stop 298
ggagatatcgaatccctgccgttag

SEQ ID NO: 476970 - DNA, 25 bp, Artificial
  probe
  misc_feature (1)..(25): SEQ ID NO: ; BIOC5_at; Start 275; Stop 299
gagatatcgaatccctgccgttagc

SEQ ID NO: 476971 - DNA, 25 bp, Artificial
  probe
  misc_feature (1)..(25): SEQ ID NO: ; BIOC5_at; Start 258; Stop 282
agaccattatctggcgggagatatc

SEQ ID NO: 476972 - DNA, 25 bp, Artificial
  probe
  misc_feature (1)..(25): SEQ ID NO: ; BIOC5_at; Start 105; Stop 129
ggcaatgcttccacagcgtaaatac

SEQ ID NO: 476973 - DNA, 25 bp, Artificial
  probe
  misc_feature (1)..(25): SEQ ID NO: ; BIOC5_at; Start 264; Stop 288
ttatctggcgggagatatcgaatcc

SEQ ID NO: 476974 - DNA, 25 bp, Artificial
  probe
  misc_feature (1)..(25): SEQ ID NO: ; BIOC5_at; Start 261; Stop 285
ccattatctggcgggagatatcgaa

SEQ ID NO: 476975 - DNA, 25 bp, Artificial
  probe
  misc_feature (1)..(25): SEQ ID NO: ; BIOC5_at; Start 335; Stop 359
cagtgcagtggtgcggtaatttatc

SEQ ID NO: 476976 - DNA, 25 bp, Artificial
  probe
  misc_feature (1)..(25): SEQ ID NO: ; BIOC5_at; Start 117; Stop 141
acagcgtaaatacacccacgtactg

SEQ ID NO: 476977 - DNA, 25 bp, Artificial
  probe
  misc_feature (1)..(25): SEQ ID NO: ; BIOC5_at; Start 116; Stop 140
cacagcgtaaatacacccacgtact

SEQ ID NO: 476978 - DNA, 25 bp, Artificial
  probe
  misc_feature (1)..(25): SEQ ID NO: ; BIOC5_at; Start 259; Stop 283
gaccattatctggcgggagatatcg

SEQ ID NO: 476979 - DNA, 25 bp, Artificial
  probe
  misc_feature (1)..(25): SEQ ID NO: ; BIOC5_at; Start 309; Stop 333
gttcgatcttgcatggagcaatctc

SEQ ID NO: 476980 - DNA, 25 bp, Artificial
  probe
  misc_feature (1)..(25): SEQ ID NO: ; BIOC5_at; Start 260; Stop 284
accattatctggcgggagatatcga

SEQ ID NO: 476981 - DNA, 25 bp, Artificial
  probe
  misc_feature (1)..(25): SEQ ID NO: ; BIOD3_at; Start 148; Stop 172
gatgttgactgcacaggtaatacaa

SEQ ID NO: 476982 - DNA, 25 bp, Artificial
  probe
  misc_feature (1)..(25): SEQ ID NO: ; BIOD3_at; Start 104; Stop 128
gtgatactggtagttggtgtgaaac

SEQ ID NO: 476983 - DNA, 25 bp, Artificial
  probe
  misc_feature (1)..(25): SEQ ID NO: ; BIOD3_at; Start 117; Stop 141
ttggtgtgaaactcggctgtattaa

SEQ ID NO: 476984 - DNA, 25 bp, Artificial
  probe
  misc_feature (1)..(25): SEQ ID NO: ; BIOD3_at; Start 103; Stop 127
ggtgatactggtagttggtgtgaaa

SEQ ID NO: 476985 - DNA, 25 bp, Artificial
  probe
  misc_feature (1)..(25): SEQ ID NO: ; BIOD3_at; Start 120; Stop 144
gtgtgaaactcggctgtattaatca

SEQ ID NO: 476986 - DNA, 25 bp, Artificial
  probe
  misc_feature (1)..(25): SEQ ID NO: ; BIOD3_at; Start 119; Stop 143
ggtgtgaaactcggctgtattaatc

SEQ ID NO: 476987 - DNA, 25 bp, Artificial
  probe
  misc_feature (1)..(25): SEQ ID NO: ; BIOD3_at; Start 75; Stop 99
cagattgggtaacacaggaacaact

SEQ ID NO: 476988 - DNA, 25 bp, Artificial
  probe
  misc_feature (1)..(25): SEQ ID NO: ; BIOD3_at; Start 118; Stop 142
tggtgtgaaactcggctgtattaat

SEQ ID NO: 476989 - DNA, 25 bp, Artificial
  probe
  misc_feature (1)..(25): SEQ ID NO: ; BIOD3_at; Start 116; Stop 140
gttggtgtgaaactcggctgtatta

SEQ ID NO: 476990 - DNA, 25 bp, Artificial
  probe
  misc_feature (1)..(25): SEQ ID NO: ; BIOD3_at; Start 102; Stop 126
cggtgatactggtagttggtgtgaa

SEQ ID NO: 476991 - DNA, 25 bp, Artificial
  probe
  misc_feature (1)..(25): SEQ ID NO: ; BIOD3_at; Start 147; Stop 171
cgatgttgactgcacaggtaataca

SEQ ID NO: 476992 - DNA, 25 bp, Artificial
  probe
  misc_feature (1)..(25): SEQ ID NO: ; BIOD3_at; Start 76; Stop 100
agattgggtaacacaggaacaactg

SEQ ID NO: 476993 - DNA, 25 bp, Artificial
  probe
  misc_feature (1)..(25): SEQ ID NO: ; BIOD3_at; Start 152; Stop 176
ttgactgcacaggtaatacaacacg

SEQ ID NO: 476994 - DNA, 25 bp, Artificial
  probe
  misc_feature (1)..(25): SEQ ID NO: ; BIOD3_at; Start 106; Stop 130
gatactggtagttggtgtgaaactc

SEQ ID NO: 476995 - DNA, 25 bp, Artificial
  probe
  misc_feature (1)..(25): SEQ ID NO: ; BIOD3_at; Start 133; Stop 157
ctgtattaatcacgcgatgttgact

SEQ ID NO: 476996 - DNA, 25 bp, Artificial
  probe
  misc_feature (1)..(25): SEQ ID NO: ; BIOD3_at; Start 105; Stop 129
tgatactggtagttggtgtgaaact

SEQ ID NO: 476997 - DNA, 25 bp, Artificial
  probe
  misc_feature (1)..(25): SEQ ID NO: ; BIOD3_at; Start 134; Stop 158
tgtattaatcacgcgatgttgactg

SEQ ID NO: 476998 - DNA, 25 bp, Artificial
  probe
  misc_feature (1)..(25): SEQ ID NO: ; BIOD3_at; Start 149; Stop 173
atgttgactgcacaggtaatacaac

SEQ ID NO: 476999 - DNA, 25 bp, Artificial
  probe
  misc_feature (1)..(25): SEQ ID NO: ; BIOD3_at; Start 232; Stop 256
tcacgctgaatatatgaccacgctc

SEQ ID NO: 477000 - DNA, 25 bp, Artificial
  probe
  misc_feature (1)..(25): SEQ ID NO: ; BIOD3_at; Start 107; Stop 131
atactggtagttggtgtgaaactcg

SEQ ID NO: 477001 - DNA, 25 bp, Artificial
  probe
  misc_feature (1)..(25): SEQ ID NO: ; BIOD3_at; Start 74; Stop 98
gcagattgggtaacacaggaacaac

SEQ ID NO: 477002 - DNA, 25 bp, Artificial
  probe
  misc_feature (1)..(25): SEQ ID NO: ; BIOD3_at; Start 63; Stop 87
ctttcacttttgcagattgggtaac

SEQ ID NO: 477003 - DNA, 25 bp, Artificial
  probe
  misc_feature (1)..(25): SEQ ID NO: ; BIOD3_at; Start 151; Stop 175
gttgactgcacaggtaatacaacac

SEQ ID NO: 477004 - DNA, 25 bp, Artificial
  probe
  misc_feature (1)..(25): SEQ ID NO: ; BIOD3_at; Start 146; Stop 170
gcgatgttgactgcacaggtaatac

SEQ ID NO: 477005 - DNA, 25 bp, Artificial
  probe
  misc_feature (1)..(25): SEQ ID NO: ; BIOD3_at; Start 123; Stop 147
tgaaactcggctgtattaatcacgc

SEQ ID NO: 477006 - DNA, 25 bp, Artificial
  probe
  misc_feature (1)..(25): SEQ ID NO: ; BIOD3_at; Start 62; Stop 86
actttcacttttgcagattgggtaa

SEQ ID NO: 477007 - DNA, 25 bp, Artificial
  probe
  misc_feature (1)..(25): SEQ ID NO: ; BIOD3_at; Start 135; Stop 159
gtattaatcacgcgatgttgactgc

SEQ ID NO: 477008 - DNA, 25 bp, Artificial
  probe
  misc_feature (1)..(25): SEQ ID NO: ; BIOD3_at; Start 132; Stop 156
gctgtattaatcacgcgatgttgac

SEQ ID NO: 477009 - DNA, 25 bp, Artificial
  probe
  misc_feature (1)..(25): SEQ ID NO: ; BIOD3_at; Start 71; Stop 95
tttgcagattgggtaacacaggaac

SEQ ID NO: 477010 - DNA, 25 bp, Artificial
  probe
  misc_feature (1)..(25): SEQ ID NO: ; BIOD3_at; Start 234; Stop 258
acgctgaatatatgaccacgctcac

SEQ ID NO: 477011 - DNA, 25 bp, Artificial
  probe
  misc_feature (1)..(25): SEQ ID NO: ; BIOD3_at; Start 233; Stop 257
cacgctgaatatatgaccacgctca

SEQ ID NO: 477012 - DNA, 25 bp, Artificial
  probe
  misc_feature (1)..(25): SEQ ID NO: ; BIOD3_at; Start 64; Stop 88
tttcacttttgcagattgggtaaca

SEQ ID NO: 477013 - DNA, 25 bp, Artificial
  probe
  misc_feature (1)..(25): SEQ ID NO: ; BIOD3_at; Start 136; Stop 160
tattaatcacgcgatgttgactgca

SEQ ID NO: 477014 - DNA, 25 bp, Artificial
  probe
  misc_feature (1)..(25): SEQ ID NO: ; BIOD5_at; Start 261; Stop 285
gcagaccgatagaatcattggtaat

SEQ ID NO: 477015 - DNA, 25 bp, Artificial
  probe
  misc_feature (1)..(25): SEQ ID NO: ; BIOD5_at; Start 260; Stop 284
ggcagaccgatagaatcattggtaa

SEQ ID NO: 477016 - DNA, 25 bp, Artificial
  probe
  misc_feature (1)..(25): SEQ ID NO: ; BIOD5_at; Start 192; Stop 216
attacgcaacagtaaatccttacac

SEQ ID NO: 477017 - DNA, 25 bp, Artificial
  probe
  misc_feature (1)..(25): SEQ ID NO: ; BIOD5_at; Start 191; Stop 215
gattacgcaacagtaaatccttaca

SEQ ID NO: 477018 - DNA, 25 bp, Artificial
  probe
  misc_feature (1)..(25): SEQ ID NO: ; BIOD5_at; Start 193; Stop 217
ttacgcaacagtaaatccttacacc

SEQ ID NO: 477019 - DNA, 25 bp, Artificial
  probe
  misc_feature (1)..(25): SEQ ID NO: ; BIOD5_at; Start 204; Stop 228
taaatccttacaccttcgcagaacc

SEQ ID NO: 477020 - DNA, 25 bp, Artificial
  probe
  misc_feature (1)..(25): SEQ ID NO: ; BIOD5_at; Start 203; Stop 227
gtaaatccttacaccttcgcagaac

SEQ ID NO: 477021 - DNA, 25 bp, Artificial
  probe
  misc_feature (1)..(25): SEQ ID NO: ; BIOD5_at; Start 202; Stop 226
agtaaatccttacaccttcgcagaa

SEQ ID NO: 477022 - DNA, 25 bp, Artificial
  probe
  misc_feature (1)..(25): SEQ ID NO: ; BIOD5_at; Start 194; Stop 218
tacgcaacagtaaatccttacacct

SEQ ID NO: 477023 - DNA, 25 bp, Artificial
  probe
  misc_feature (1)..(25): SEQ ID NO: ; BIOD5_at; Start 198; Stop 222
caacagtaaatccttacaccttcgc

SEQ ID NO: 477024 - DNA, 25 bp, Artificial
  probe
  misc_feature (1)..(25): SEQ ID NO: ; BIOD5_at; Start 197; Stop 221
gcaacagtaaatccttacaccttcg

SEQ ID NO: 477025 - DNA, 25 bp, Artificial
  probe
  misc_feature (1)..(25): SEQ ID NO: ; BIOD5_at; Start 196; Stop 220
cgcaacagtaaatccttacaccttc

SEQ ID NO: 477026 - DNA, 25 bp, Artificial
  probe
  misc_feature (1)..(25): SEQ ID NO: ; BIOD5_at; Start 255; Stop 279
aagagggcagaccgatagaatcatt

SEQ ID NO: 477027 - DNA, 25 bp, Artificial
  probe
  misc_feature (1)..(25): SEQ ID NO: ; BIOD5_at; Start 199; Stop 223
aacagtaaatccttacaccttcgca

SEQ ID NO: 477028 - DNA, 25 bp, Artificial
  probe
  misc_feature (1)..(25): SEQ ID NO: ; BIOD5_at; Start 201; Stop 225
cagtaaatccttacaccttcgcaga

SEQ ID NO: 477029 - DNA, 25 bp, Artificial
  probe
  misc_feature (1)..(25): SEQ ID NO: ; BIOD5_at; Start 195; Stop 219
acgcaacagtaaatccttacacctt

SEQ ID NO: 477030 - DNA, 25 bp, Artificial
  probe
  misc_feature (1)..(25): SEQ ID NO: ; BIOD5_at; Start 200; Stop 224
acagtaaatccttacaccttcgcag

SEQ ID NO: 477031 - DNA, 25 bp, Artificial
  probe
  misc_feature (1)..(25): SEQ ID NO: ; BIOD5_at; Start 256; Stop 280
agagggcagaccgatagaatcattg

SEQ ID NO: 477032 - DNA, 25 bp, Artificial
  probe
  misc_feature (1)..(25): SEQ ID NO: ; BIOD5_at; Start 254; Stop 278
caagagggcagaccgatagaatcat

SEQ ID NO: 477033 - DNA, 25 bp, Artificial
  probe
  misc_feature (1)..(25): SEQ ID NO: ; BIOD5_at; Start 259; Stop 283
gggcagaccgatagaatcattggta

SEQ ID NO: 477034 - DNA, 25 bp, Artificial
  probe
  misc_feature (1)..(25): SEQ ID NO: ; BIOD5_at; Start 257; Stop 281
gagggcagaccgatagaatcattgg

SEQ ID NO: 477035 - DNA, 25 bp, Artificial
  probe
  misc_feature (1)..(25): SEQ ID NO: ; BIOD5_at; Start 205; Stop 229
aaatccttacaccttcgcagaaccc

SEQ ID NO: 477036 - DNA, 25 bp, Artificial
  probe
  misc_feature (1)..(25): SEQ ID NO: ; BIOD5_at; Start 19; Stop 43
ggataccgaagtggggaaaactgtc

SEQ ID NO: 477037 - DNA, 25 bp, Artificial
  probe
  misc_feature (1)..(25): SEQ ID NO: ; BIOD5_at; Start 1; Stop 25
ttattttgtcaccggaacggatacc

SEQ ID NO: 477038 - DNA, 25 bp, Artificial
  probe
  misc_feature (1)..(25): SEQ ID NO: ; BIOD5_at; Start 2; Stop 26
tattttgtcaccggaacggataccg

SEQ ID NO: 477039 - DNA, 25 bp, Artificial
  probe
  misc_feature (1)..(25): SEQ ID NO: ; CRE3_at; Start 128; Stop 152
ctgatgatccgaataactacctgtt

SEQ ID NO: 477040 - DNA, 25 bp, Artificial
  probe
  misc_feature (1)..(25): SEQ ID NO: ; CRE3_at; Start 122; Stop 146
gtgtagctgatgatccgaataacta

SEQ ID NO: 477041 - DNA, 25 bp, Artificial
  probe
  misc_feature (1)..(25): SEQ ID NO: ; CRE3_at; Start 125; Stop 149
tagctgatgatccgaataactacct

SEQ ID NO: 477042 - DNA, 25 bp, Artificial
  probe
  misc_feature (1)..(25): SEQ ID NO: ; CRE3_at; Start 12; Stop 36
aatgttaatccatattggcagaacg

SEQ ID NO: 477043 - DNA, 25 bp, Artificial
  probe
  misc_feature (1)..(25): SEQ ID NO: ; CRE3_at; Start 8; Stop 32
ggagaatgttaatccatattggcag

SEQ ID NO: 477044 - DNA, 25 bp, Artificial
  probe
  misc_feature (1)..(25): SEQ ID NO: ; CRE3_at; Start 13; Stop 37
atgttaatccatattggcagaacga

SEQ ID NO: 477045 - DNA, 25 bp, Artificial
  probe
  misc_feature (1)..(25): SEQ ID NO: ; CRE3_at; Start 127; Stop 151
gctgatgatccgaataactacctgt

SEQ ID NO: 477046 - DNA, 25 bp, Artificial
  probe
  misc_feature (1)..(25): SEQ ID NO: ; CRE3_at; Start 14; Stop 38
tgttaatccatattggcagaacgaa

SEQ ID NO: 477047 - DNA, 25 bp, Artificial
  probe
  misc_feature (1)..(25): SEQ ID NO: ; CRE3_at; Start 9; Stop 33
gagaatgttaatccatattggcaga

SEQ ID NO: 477048 - DNA, 25 bp, Artificial
  probe
  misc_feature (1)..(25): SEQ ID NO: ; CRE3_at; Start 11; Stop 35
gaatgttaatccatattggcagaac

SEQ ID NO: 477049 - DNA, 25 bp, Artificial
  probe
  misc_feature (1)..(25): SEQ ID NO: ; CRE3_at; Start 10; Stop 34
agaatgttaatccatattggcagaa

SEQ ID NO: 477050 - DNA, 25 bp, Artificial
  probe
  misc_feature (1)..(25): SEQ ID NO: ; CRE3_at; Start 126; Stop 150
agctgatgatccgaataactacctg

SEQ ID NO: 477051 - DNA, 25 bp, Artificial
  probe
  misc_feature (1)..(25): SEQ ID NO: ; CRE3_at; Start 121; Stop 145
ggtgtagctgatgatccgaataact

SEQ ID NO: 477052 - DNA, 25 bp, Artificial
  probe
  misc_feature (1)..(25): SEQ ID NO: ; CRE3_at; Start 119; Stop 143
ctggtgtagctgatgatccgaataa

SEQ ID NO: 477053 - DNA, 25 bp, Artificial
  probe
  misc_feature (1)..(25): SEQ ID NO: ; CRE3_at; Start 129; Stop 153
tgatgatccgaataactacctgttt

SEQ ID NO: 477054 - DNA, 25 bp, Artificial
  probe
  misc_feature (1)..(25): SEQ ID NO: ; CRE3_at; Start 120; Stop 144
tggtgtagctgatgatccgaataac

SEQ ID NO: 477055 - DNA, 25 bp, Artificial
  probe
  misc_feature (1)..(25): SEQ ID NO: ; CRE3_at; Start 123; Stop 147
tgtagctgatgatccgaataactac

SEQ ID NO: 477056 - DNA, 25 bp, Artificial
  probe
  misc_feature (1)..(25): SEQ ID NO: ; CRE3_at; Start 124; Stop 148
gtagctgatgatccgaataactacc

SEQ ID NO: 477057 - DNA, 25 bp, Artificial
  probe
  misc_feature (1)..(25): SEQ ID NO: ; CRE3_at; Start 118; Stop 142
tctggtgtagctgatgatccgaata

SEQ ID NO: 477058 - DNA, 25 bp, Artificial
  probe
  misc_feature (1)..(25): SEQ ID NO: ; CRE3_at; Start 15; Stop 39
gttaatccatattggcagaacgaaa

SEQ ID NO: 477059 - DNA, 25 bp, Artificial
  probe
  misc_feature (1)..(25): SEQ ID NO: ; CRE3_at; Start 5; Stop 29
gtgggagaatgttaatccatattgg

SEQ ID NO: 477060 - DNA, 25 bp, Artificial
  probe
  misc_feature (1)..(25): SEQ ID NO: ; CRE3_at; Start 4; Stop 28
ggtgggagaatgttaatccatattg

SEQ ID NO: 477061 - DNA, 25 bp, Artificial
  probe
  misc_feature (1)..(25): SEQ ID NO: ; CRE3_at; Start 3; Stop 27
cggtgggagaatgttaatccatatt

SEQ ID NO: 477062 - DNA, 25 bp, Artificial
  probe
  misc_feature (1)..(25): SEQ ID NO: ; CRE3_at; Start 396; Stop 420
tgtcatgaactatatccgtaacctg

SEQ ID NO: 477063 - DNA, 25 bp, Artificial
  probe
  misc_feature (1)..(25): SEQ ID NO: ; CRE3_at; Start 7; Stop 31
gggagaatgttaatccatattggca

SEQ ID NO: 477064 - DNA, 25 bp, Artificial
  probe
  misc_feature (1)..(25): SEQ ID NO: ; CRE3_at; Start 6; Stop 30
tgggagaatgttaatccatattggc

SEQ ID NO: 477065 - DNA, 25 bp, Artificial
  probe
  misc_feature (1)..(25): SEQ ID NO: ; CRE3_at; Start 397; Stop 421
gtcatgaactatatccgtaacctgg

SEQ ID NO: 477066 - DNA, 25 bp, Artificial
  probe
  misc_feature (1)..(25): SEQ ID NO: ; CRE3_at; Start 395; Stop 419
ttgtcatgaactatatccgtaacct

SEQ ID NO: 477067 - DNA, 25 bp, Artificial
  probe
  misc_feature (1)..(25): SEQ ID NO: ; CRE3_at; Start 2; Stop 26
acggtgggagaatgttaatccatat

SEQ ID NO: 477068 - DNA, 25 bp, Artificial
  probe
  misc_feature (1)..(25): SEQ ID NO: ; CRE3_at; Start 399; Stop 423
catgaactatatccgtaacctggat

SEQ ID NO: 477069 - DNA, 25 bp, Artificial
  probe
  misc_feature (1)..(25): SEQ ID NO: ; CRE3_at; Start 394; Stop 418
attgtcatgaactatatccgtaacc

SEQ ID NO: 477070 - DNA, 25 bp, Artificial
  probe
  misc_feature (1)..(25): SEQ ID NO: ; CRE3_at; Start 1; Stop 25
gacggtgggagaatgttaatccata

SEQ ID NO: 477071 - DNA, 25 bp, Artificial
  probe
  misc_feature (1)..(25): SEQ ID NO: ; CRE3_at; Start 377; Stop 401
gctggaccaatgtaaatattgtcat

SEQ ID NO: 477072 - DNA, 25 bp, Artificial
  probe
  misc_feature (1)..(25): SEQ ID NO: ; CRE5_at; Start 215; Stop 239
gcgattatcttctatatcttcaggc

SEQ ID NO: 477073 - DNA, 25 bp, Artificial
  probe
  misc_feature (1)..(25): SEQ ID NO: ; CRE5_at; Start 216; Stop 240
cgattatcttctatatcttcaggcg

SEQ ID NO: 477074 - DNA, 25 bp, Artificial
  probe
  misc_feature (1)..(25): SEQ ID NO: ; CRE5_at; Start 4; Stop 28
tccaatttactgaccgtacaccaaa

SEQ ID NO: 477075 - DNA, 25 bp, Artificial
  probe
  misc_feature (1)..(25): SEQ ID NO: ; CRE5_at; Start 218; Stop 242
attatcttctatatcttcaggcgcg

SEQ ID NO: 477076 - DNA, 25 bp, Artificial
  probe
  misc_feature (1)..(25): SEQ ID NO: ; CRE5_at; Start 217; Stop 241
gattatcttctatatcttcaggcgc

SEQ ID NO: 477077 - DNA, 25 bp, Artificial
  probe
  misc_feature (1)..(25): SEQ ID NO: ; CRE5_at; Start 214; Stop 238
cgcgattatcttctatatcttcagg

SEQ ID NO: 477078 - DNA, 25 bp, Artificial
  probe
  misc_feature (1)..(25): SEQ ID NO: ; CRE5_at; Start 1; Stop 25
atgtccaatttactgaccgtacacc

SEQ ID NO: 477079 - DNA, 25 bp, Artificial
  probe
  misc_feature (1)..(25): SEQ ID NO: ; CRE5_at; Start 3; Stop 27
gtccaatttactgaccgtacaccaa

SEQ ID NO: 477080 - DNA, 25 bp, Artificial
  probe
  misc_feature (1)..(25): SEQ ID NO: ; CRE5_at; Start 485; Stop 509
catttctggggattgcttataacac

SEQ ID NO: 477081 - DNA, 25 bp, Artificial
  probe
  misc_feature (1)..(25): SEQ ID NO: ; CRE5_at; Start 470; Stop 494
atatacgtaatctggcatttctggg

SEQ ID NO: 477082 - DNA, 25 bp, Artificial
  probe
  misc_feature (1)..(25): SEQ ID NO: ; CRE5_at; Start 469; Stop 493
gatatacgtaatctggcatttctgg

SEQ ID NO: 477083 - DNA, 25 bp, Artificial
  probe
  misc_feature (1)..(25): SEQ ID NO: ; CRE5_at; Start 468; Stop 492
ggatatacgtaatctggcatttctg

SEQ ID NO: 477084 - DNA, 25 bp, Artificial
  probe
  misc_feature (1)..(25): SEQ ID NO: ; CRE5_at; Start 467; Stop 491
aggatatacgtaatctggcatttct

SEQ ID NO: 477085 - DNA, 25 bp, Artificial
  probe
  misc_feature (1)..(25): SEQ ID NO: ; CRE5_at; Start 486; Stop 510
atttctggggattgcttataacacc

SEQ ID NO: 477086 - DNA, 25 bp, Artificial
  probe
  misc_feature (1)..(25): SEQ ID NO: ; CRE5_at; Start 457; Stop 481
gatcgctgccaggatatacgtaatc

SEQ ID NO: 477087 - DNA, 25 bp, Artificial
  probe
  misc_feature (1)..(25): SEQ ID NO: ; CRE5_at; Start 431; Stop 455
aggttcgttcactcatggaaaatag

SEQ ID NO: 477088 - DNA, 25 bp, Artificial
  probe
  misc_feature (1)..(25): SEQ ID NO: ; CRE5_at; Start 6; Stop 30
caatttactgaccgtacaccaaaat

SEQ ID NO: 477089 - DNA, 25 bp, Artificial
  probe
  misc_feature (1)..(25): SEQ ID NO: ; CRE5_at; Start 5; Stop 29
ccaatttactgaccgtacaccaaaa

SEQ ID NO: 477090 - DNA, 25 bp, Artificial
  probe
  misc_feature (1)..(25): SEQ ID NO: ; CRE5_at; Start 430; Stop 454
caggttcgttcactcatggaaaata

SEQ ID NO: 477091 - DNA, 25 bp, Artificial
  probe
  misc_feature (1)..(25): SEQ ID NO: ; CRE5_at; Start 458; Stop 482
atcgctgccaggatatacgtaatct

SEQ ID NO: 477092 - DNA, 25 bp, Artificial
  probe
  misc_feature (1)..(25): SEQ ID NO: ; CRE5_at; Start 466; Stop 490
caggatatacgtaatctggcatttc

SEQ ID NO: 477093 - DNA, 25 bp, Artificial
  probe
  misc_feature (1)..(25): SEQ ID NO: ; CRE5_at; Start 9; Stop 33
tttactgaccgtacaccaaaatttg

SEQ ID NO: 477094 - DNA, 25 bp, Artificial
  probe
  misc_feature (1)..(25): SEQ ID NO: ; CRE5_at; Start 436; Stop 460
cgttcactcatggaaaatagcgatc

SEQ ID NO: 477095 - DNA, 25 bp, Artificial
  probe
  misc_feature (1)..(25): SEQ ID NO: ; CRE5_at; Start 2; Stop 26
tgtccaatttactgaccgtacacca

SEQ ID NO: 477096 - DNA, 25 bp, Artificial
  probe
  misc_feature (1)..(25): SEQ ID NO: ; CRE5_at; Start 432; Stop 456
ggttcgttcactcatggaaaatagc

SEQ ID NO: 477097 - DNA, 25 bp, Artificial
  probe
  misc_feature (1)..(25): SEQ ID NO: ; CRE5_at; Start 8; Stop 32
atttactgaccgtacaccaaaattt

SEQ ID NO: 477098 - DNA, 25 bp, Artificial
  probe
  misc_feature (1)..(25): SEQ ID NO: ; CRE5_at; Start 433; Stop 457
gttcgttcactcatggaaaatagcg

SEQ ID NO: 477099 - DNA, 25 bp, Artificial
  probe
  misc_feature (1)..(25): SEQ ID NO: ; CRE5_at; Start 19; Stop 43
gtacaccaaaatttgcctgcattac

SEQ ID NO: 477100 - DNA, 25 bp, Artificial
  probe
  misc_feature (1)..(25): SEQ ID NO: ; CRE5_at; Start 165; Stop 189
gtgcaagttgaataaccggaaatgg

SEQ ID NO: 477101 - DNA, 25 bp, Artificial
  probe
  misc_feature (1)..(25): SEQ ID NO: ; CRE5_at; Start 10; Stop 34
ttactgaccgtacaccaaaatttgc

SEQ ID NO: 477102 - DNA, 25 bp, Artificial
  probe
  misc_feature (1)..(25): SEQ ID NO: ; CRE5_at; Start 161; Stop 185
catggtgcaagttgaataaccggaa

SEQ ID NO: 477103 - DNA, 25 bp, Artificial
  probe
  misc_feature (1)..(25): SEQ ID NO: ; CRE5_at; Start 20; Stop 44
tacaccaaaatttgcctgcattacc

SEQ ID NO: 477104 - DNA, 25 bp, Artificial
  probe
  misc_feature (1)..(25): SEQ ID NO: ; CRE5_at; Start 459; Stop 483
tcgctgccaggatatacgtaatctg

SEQ ID NO: 477105 - DNA, 25 bp, Artificial
  probe
  misc_feature (1)..(25): SEQ ID NO: ; DAP3_at; Start 183; Stop 207
aattgtcactgtcatcagaatctgt

SEQ ID NO: 477106 - DNA, 25 bp, Artificial
  probe
  misc_feature (1)..(25): SEQ ID NO: ; DAP3_at; Start 184; Stop 208
attgtcactgtcatcagaatctgtc

SEQ ID NO: 477107 - DNA, 25 bp, Artificial
  probe
  misc_feature (1)..(25): SEQ ID NO: ; DAP3_at; Start 414; Stop 438
tacaatagaggcaaagaaacaaagc

SEQ ID NO: 477108 - DNA, 25 bp, Artificial
  probe
  misc_feature (1)..(25): SEQ ID NO: ; DAP3_at; Start 20; Stop 44
taatgatatgcgatttgacagaagc

SEQ ID NO: 477109 - DNA, 25 bp, Artificial
  probe
  misc_feature (1)..(25): SEQ ID NO: ; DAP3_at; Start 500; Stop 524
atgggtatattgaaatcgttgaagc

SEQ ID NO: 477110 - DNA, 25 bp, Artificial
  probe
  misc_feature (1)..(25): SEQ ID NO: ; DAP3_at; Start 490; Stop 514
cctctgacgaatgggtatattgaaa

SEQ ID NO: 477111 - DNA, 25 bp, Artificial
  probe
  misc_feature (1)..(25): SEQ ID NO: ; DAP3_at; Start 486; Stop 510
tactcctctgacgaatgggtatatt

SEQ ID NO: 477112 - DNA, 25 bp, Artificial
  probe
  misc_feature (1)..(25): SEQ ID NO: ; DAP3_at; Start 411; Stop 435
ggatacaatagaggcaaagaaacaa

SEQ ID NO: 477113 - DNA, 25 bp, Artificial
  probe
  misc_feature (1)..(25): SEQ ID NO: ; DAP3_at; Start 485; Stop 509
ctactcctctgacgaatgggtatat

SEQ ID NO: 477114 - DNA, 25 bp, Artificial
  probe
  misc_feature (1)..(25): SEQ ID NO: ; DAP3_at; Start 409; Stop 433
tcggatacaatagaggcaaagaaac

SEQ ID NO: 477115 - DNA, 25 bp, Artificial
  probe
  misc_feature (1)..(25): SEQ ID NO: ; DAP3_at; Start 489; Stop 513
tcctctgacgaatgggtatattgaa

SEQ ID NO: 477116 - DNA, 25 bp, Artificial
  probe
  misc_feature (1)..(25): SEQ ID NO: ; DAP3_at; Start 410; Stop 434
cggatacaatagaggcaaagaaaca

SEQ ID NO: 477117 - DNA, 25 bp, Artificial
  probe
  misc_feature (1)..(25): SEQ ID NO: ; DAP3_at; Start 492; Stop 516
tctgacgaatgggtatattgaaatc

SEQ ID NO: 477118 - DNA, 25 bp, Artificial
  probe
  misc_feature (1)..(25): SEQ ID NO: ; DAP3_at; Start 491; Stop 515
ctctgacgaatgggtatattgaaat

SEQ ID NO: 477119 - DNA, 25 bp, Artificial
  probe
  misc_feature (1)..(25): SEQ ID NO: ; DAP3_at; Start 18; Stop 42
agtaatgatatgcgatttgacagaa

SEQ ID NO: 477120 - DNA, 25 bp, Artificial
  probe
  misc_feature (1)..(25): SEQ ID NO: ; DAP3_at; Start 17; Stop 41
aagtaatgatatgcgatttgacaga

SEQ ID NO: 477121 - DNA, 25 bp, Artificial
  probe
  misc_feature (1)..(25): SEQ ID NO: ; DAP3_at; Start 488; Stop 512
ctcctctgacgaatgggtatattga

SEQ ID NO: 477122 - DNA, 25 bp, Artificial
  probe
  misc_feature (1)..(25): SEQ ID NO: ; DAP3_at; Start 484; Stop 508
tctactcctctgacgaatgggtata

SEQ ID NO: 477123 - DNA, 25 bp, Artificial
  probe
  misc_feature (1)..(25): SEQ ID NO: ; DAP3_at; Start 19; Stop 43
gtaatgatatgcgatttgacagaag

SEQ ID NO: 477124 - DNA, 25 bp, Artificial
  probe
  misc_feature (1)..(25): SEQ ID NO: ; DAP3_at; Start 339; Stop 363
gcataaagtcagcaaggtttactat

SEQ ID NO: 477125 - DNA, 25 bp, Artificial
  probe
  misc_feature (1)..(25): SEQ ID NO: ; DAP3_at; Start 501; Stop 525
tgggtatattgaaatcgttgaagcg

SEQ ID NO: 477126 - DNA, 25 bp, Artificial
  probe
  misc_feature (1)..(25): SEQ ID NO: ; DAP3_at; Start 487; Stop 511
actcctctgacgaatgggtatattg

SEQ ID NO: 477127 - DNA, 25 bp, Artificial
  probe
  misc_feature (1)..(25): SEQ ID NO: ; DAP3_at; Start 408; Stop 432
ctcggatacaatagaggcaaagaaa

SEQ ID NO: 477128 - DNA, 25 bp, Artificial
  probe
  misc_feature (1)..(25): SEQ ID NO: ; DAP3_at; Start 405; Stop 429
tatctcggatacaatagaggcaaag

SEQ ID NO: 477129 - DNA, 25 bp, Artificial
  probe
  misc_feature (1)..(25): SEQ ID NO: ; DAP3_at; Start 403; Stop 427
gatatctcggatacaatagaggcaa

SEQ ID NO: 477130 - DNA, 25 bp, Artificial
  probe
  misc_feature (1)..(25): SEQ ID NO: ; DAP3_at; Start 401; Stop 425
ttgatatctcggatacaatagaggc

SEQ ID NO: 477131 - DNA, 25 bp, Artificial
  probe
  misc_feature (1)..(25): SEQ ID NO: ; DAP3_at; Start 402; Stop 426
tgatatctcggatacaatagaggca

SEQ ID NO: 477132 - DNA, 25 bp, Artificial
  probe
  misc_feature (1)..(25): SEQ ID NO: ; DAP3_at; Start 16; Stop 40
aaagtaatgatatgcgatttgacag

SEQ ID NO: 477133 - DNA, 25 bp, Artificial
  probe
  misc_feature (1)..(25): SEQ ID NO: ; DAP3_at; Start 406; Stop 430
atctcggatacaatagaggcaaaga

SEQ ID NO: 477134 - DNA, 25 bp, Artificial
  probe
  misc_feature (1)..(25): SEQ ID NO: ; DAP3_at; Start 404; Stop 428
atatctcggatacaatagaggcaaa

SEQ ID NO: 477135 - DNA, 25 bp, Artificial
  probe
  misc_feature (1)..(25): SEQ ID NO: ; DAP3_at; Start 338; Stop 362
cgcataaagtcagcaaggtttacta

SEQ ID NO: 477136 - DNA, 25 bp, Artificial
  probe
  misc_feature (1)..(25): SEQ ID NO: ; DAP3_at; Start 407; Stop 431
tctcggatacaatagaggcaaagaa

SEQ ID NO: 477137 - DNA, 25 bp, Artificial
  probe
  misc_feature (1)..(25): SEQ ID NO: ; DAP3_at; Start 413; Stop 437
atacaatagaggcaaagaaacaaag

SEQ ID NO: 477138 - DNA, 25 bp, Artificial
  probe
  misc_feature (1)..(25): SEQ ID NO: ; DAP5_at; Start 135; Stop 159
attatctgatgtgatgcctgttgag

SEQ ID NO: 477139 - DNA, 25 bp, Artificial
  probe
  misc_feature (1)..(25): SEQ ID NO: ; DAP5_at; Start 134; Stop 158
aattatctgatgtgatgcctgttga

SEQ ID NO: 477140 - DNA, 25 bp, Artificial
  probe
  misc_feature (1)..(25): SEQ ID NO: ; DAP5_at; Start 108; Stop 132
catagaccatacatacgatcagcaa

SEQ ID NO: 477141 - DNA, 25 bp, Artificial
  probe
  misc_feature (1)..(25): SEQ ID NO: ; DAP5_at; Start 136; Stop 160
ttatctgatgtgatgcctgttgagt

SEQ ID NO: 477142 - DNA, 25 bp, Artificial
  probe
  misc_feature (1)..(25): SEQ ID NO: ; DAP5_at; Start 107; Stop 131
ccatagaccatacatacgatcagca

SEQ ID NO: 477143 - DNA, 25 bp, Artificial
  probe
  misc_feature (1)..(25): SEQ ID NO: ; DAP5_at; Start 441; Stop 465
tgaggatgttgagattattgagctt

SEQ ID NO: 477144 - DNA, 25 bp, Artificial
  probe
  misc_feature (1)..(25): SEQ ID NO: ; DAP5_at; Start 440; Stop 464
ttgaggatgttgagattattgagct

SEQ ID NO: 477145 - DNA, 25 bp, Artificial
  probe
  misc_feature (1)..(25): SEQ ID NO: ; DAP5_at; Start 442; Stop 466
gaggatgttgagattattgagcttc

SEQ ID NO: 477146 - DNA, 25 bp, Artificial
  probe
  misc_feature (1)..(25): SEQ ID NO: ; DAP5_at; Start 137; Stop 161
tatctgatgtgatgcctgttgagtc

SEQ ID NO: 477147 - DNA, 25 bp, Artificial
  probe
  misc_feature (1)..(25): SEQ ID NO: ; DAP5_at; Start 443; Stop 467
aggatgttgagattattgagcttca

SEQ ID NO: 477148 - DNA, 25 bp, Artificial
  probe
  misc_feature (1)..(25): SEQ ID NO: ; DAP5_at; Start 439; Stop 463
tttgaggatgttgagattattgagc

SEQ ID NO: 477149 - DNA, 25 bp, Artificial
  probe
  misc_feature (1)..(25): SEQ ID NO: ; DAP5_at; Start 444; Stop 468
ggatgttgagattattgagcttcat

SEQ ID NO: 477150 - DNA, 25 bp, Artificial
  probe
  misc_feature (1)..(25): SEQ ID NO: ; DAP5_at; Start 157; Stop 181
gagtcagatgctttcatttacacag

SEQ ID NO: 477151 - DNA, 25 bp, Artificial
  probe
  misc_feature (1)..(25): SEQ ID NO: ; DAP5_at; Start 133; Stop 157
aaattatctgatgtgatgcctgttg

SEQ ID NO: 477152 - DNA, 25 bp, Artificial
  probe
  misc_feature (1)..(25): SEQ ID NO: ; DAP5_at; Start 159; Stop 183
gtcagatgctttcatttacacagat

SEQ ID NO: 477153 - DNA, 25 bp, Artificial
  probe
  misc_feature (1)..(25): SEQ ID NO: ; DAP5_at; Start 158; Stop 182
agtcagatgctttcatttacacaga

SEQ ID NO: 477154 - DNA, 25 bp, Artificial
  probe
  misc_feature (1)..(25): SEQ ID NO: ; DAP5_at; Start 447; Stop 471
tgttgagattattgagcttcatcat

SEQ ID NO: 477155 - DNA, 25 bp, Artificial
  probe
  misc_feature (1)..(25): SEQ ID NO: ; DAP5_at; Start 446; Stop 470
atgttgagattattgagcttcatca

SEQ ID NO: 477156 - DNA, 25 bp, Artificial
  probe
  misc_feature (1)..(25): SEQ ID NO: ; DAP5_at; Start 155; Stop 179
ttgagtcagatgctttcatttacac

SEQ ID NO: 477157 - DNA, 25 bp, Artificial
  probe
  misc_feature (1)..(25): SEQ ID NO: ; DAP5_at; Start 154; Stop 178
gttgagtcagatgctttcatttaca

SEQ ID NO: 477158 - DNA, 25 bp, Artificial
  probe
  misc_feature (1)..(25): SEQ ID NO: ; DAP5_at; Start 153; Stop 177
tgttgagtcagatgctttcatttac

SEQ ID NO: 477159 - DNA, 25 bp, Artificial
  probe
  misc_feature (1)..(25): SEQ ID NO: ; DAP5_at; Start 518; Stop 542
aaatgatttcagaagtccgtaaaga

SEQ ID NO: 477160 - DNA, 25 bp, Artificial
  probe
  misc_feature (1)..(25): SEQ ID NO: ; DAP5_at; Start 448; Stop 472
gttgagattattgagcttcatcatg

SEQ ID NO: 477161 - DNA, 25 bp, Artificial
  probe
  misc_feature (1)..(25): SEQ ID NO: ; DAP5_at; Start 109; Stop 133
atagaccatacatacgatcagcaaa

SEQ ID NO: 477162 - DNA, 25 bp, Artificial
  probe
  misc_feature (1)..(25): SEQ ID NO: ; DAP5_at; Start 156; Stop 180
tgagtcagatgctttcatttacaca

SEQ ID NO: 477163 - DNA, 25 bp, Artificial
  probe
  misc_feature (1)..(25): SEQ ID NO: ; DAP5_at; Start 519; Stop 543
aatgatttcagaagtccgtaaagaa

SEQ ID NO: 477164 - DNA, 25 bp, Artificial
  probe
  misc_feature (1)..(25): SEQ ID NO: ; DAP5_at; Start 106; Stop 130
gccatagaccatacatacgatcagc

SEQ ID NO: 477165 - DNA, 25 bp, Artificial
  probe
  misc_feature (1)..(25): SEQ ID NO: ; DAP5_at; Start 214; Stop 238
gatgtcttgattgatttaacaacgc

SEQ ID NO: 477166 - DNA, 25 bp, Artificial
  probe
  misc_feature (1)..(25): SEQ ID NO: ; DAP5_at; Start 160; Stop 184
tcagatgctttcatttacacagata

SEQ ID NO: 477167 - DNA, 25 bp, Artificial
  probe
  misc_feature (1)..(25): SEQ ID NO: ; DAP5_at; Start 215; Stop 239
atgtcttgattgatttaacaacgcc

SEQ ID NO: 477168 - DNA, 25 bp, Artificial
  probe
  misc_feature (1)..(25): SEQ ID NO: ; DAP5_at; Start 213; Stop 237
ggatgtcttgattgatttaacaacg

SEQ ID NO: 477169 - DNA, 25 bp, Artificial
  probe
  misc_feature (1)..(25): SEQ ID NO: ; DAP5_at; Start 212; Stop 236
cggatgtcttgattgatttaacaac

SEQ ID NO: 477170 - DNA, 25 bp, Artificial
  probe
  misc_feature (1)..(25): SEQ ID NO: ; DAP5_at; Start 152; Stop 176
ctgttgagtcagatgctttcattta

SEQ ID NO: 477171 - DNA, 25 bp, Artificial
  probe
  misc_feature (1)..(25): SEQ ID NO: ; DAPM_at; Start 416; Stop 440
ttatgtgatgtgtattccattccgc

SEQ ID NO: 477172 - DNA, 25 bp, Artificial
  probe
  misc_feature (1)..(25): SEQ ID NO: ; DAPM_at; Start 5; Stop 29
catgattcttataaccgtgcttctt

SEQ ID NO: 477173 - DNA, 25 bp, Artificial
  probe
  misc_feature (1)..(25): SEQ ID NO: ; DAPM_at; Start 4; Stop 28
ccatgattcttataaccgtgcttct

SEQ ID NO: 477174 - DNA, 25 bp, Artificial
  probe
  misc_feature (1)..(25): SEQ ID NO: ; DAPM_at; Start 417; Stop 441
tatgtgatgtgtattccattccgct

SEQ ID NO: 477175 - DNA, 25 bp, Artificial
  probe
  misc_feature (1)..(25): SEQ ID NO: ; DAPM_at; Start 410; Stop 434
atccgtttatgtgatgtgtattcca

SEQ ID NO: 477176 - DNA, 25 bp, Artificial
  probe
  misc_feature (1)..(25): SEQ ID NO: ; DAPM_at; Start 409; Stop 433
aatccgtttatgtgatgtgtattcc

SEQ ID NO: 477177 - DNA, 25 bp, Artificial
  probe
  misc_feature (1)..(25): SEQ ID NO: ; DAPM_at; Start 169; Stop 193
tatggttcaatttacgactgcctat

SEQ ID NO: 477178 - DNA, 25 bp, Artificial
  probe
  misc_feature (1)..(25): SEQ ID NO: ; DAPM_at; Start 168; Stop 192
atatggttcaatttacgactgccta

SEQ ID NO: 477179 - DNA, 25 bp, Artificial
  probe
  misc_feature (1)..(25): SEQ ID NO: ; DAPM_at; Start 163; Stop 187
acaggatatggttcaatttacgact

SEQ ID NO: 477180 - DNA, 25 bp, Artificial
  probe
  misc_feature (1)..(25): SEQ ID NO: ; DAPM_at; Start 534; Stop 558
atgtataatgctgacgttcttgctt

SEQ ID NO: 477181 - DNA, 25 bp, Artificial
  probe
  misc_feature (1)..(25): SEQ ID NO: ; DAPM_at; Start 533; Stop 557
aatgtataatgctgacgttcttgct

SEQ ID NO: 477182 - DNA, 25 bp, Artificial
  probe
  misc_feature (1)..(25): SEQ ID NO: ; DAPM_at; Start 531; Stop 555
cgaatgtataatgctgacgttcttg

SEQ ID NO: 477183 - DNA, 25 bp, Artificial
  probe
  misc_feature (1)..(25): SEQ ID NO: ; DAPM_at; Start 412; Stop 436
ccgtttatgtgatgtgtattccatt

SEQ ID NO: 477184 - DNA, 25 bp, Artificial
  probe
  misc_feature (1)..(25): SEQ ID NO: ; DAPM_at; Start 411; Stop 435
tccgtttatgtgatgtgtattccat

SEQ ID NO: 477185 - DNA, 25 bp, Artificial
  probe
  misc_feature (1)..(25): SEQ ID NO: ; DAPM_at; Start 415; Stop 439
tttatgtgatgtgtattccattccg

SEQ ID NO: 477186 - DNA, 25 bp, Artificial
  probe
  misc_feature (1)..(25): SEQ ID NO: ; DAPM_at; Start 532; Stop 556
gaatgtataatgctgacgttcttgc

SEQ ID NO: 477187 - DNA, 25 bp, Artificial
  probe
  misc_feature (1)..(25): SEQ ID NO: ; DAPM_at; Start 3; Stop 27
gccatgattcttataaccgtgcttc

SEQ ID NO: 477188 - DNA, 25 bp, Artificial
  probe
  misc_feature (1)..(25): SEQ ID NO: ; DAPM_at; Start 162; Stop 186
aacaggatatggttcaatttacgac

SEQ ID NO: 477189 - DNA, 25 bp, Artificial
  probe
  misc_feature (1)..(25): SEQ ID NO: ; DAPM_at; Start 170; Stop 194
atggttcaatttacgactgcctatc

SEQ ID NO: 477190 - DNA, 25 bp, Artificial
  probe
  misc_feature (1)..(25): SEQ ID NO: ; DAPM_at; Start 167; Stop 191
gatatggttcaatttacgactgcct

SEQ ID NO: 477191 - DNA, 25 bp, Artificial
  probe
  misc_feature (1)..(25): SEQ ID NO: ; DAPM_at; Start 165; Stop 189
aggatatggttcaatttacgactgc

SEQ ID NO: 477192 - DNA, 25 bp, Artificial
  probe
  misc_feature (1)..(25): SEQ ID NO: ; DAPM_at; Start 530; Stop 554
ccgaatgtataatgctgacgttctt

SEQ ID NO: 477193 - DNA, 25 bp, Artificial
  probe
  misc_feature (1)..(25): SEQ ID NO: ; DAPM_at; Start 413; Stop 437
cgtttatgtgatgtgtattccattc

SEQ ID NO: 477194 - DNA, 25 bp, Artificial
  probe
  misc_feature (1)..(25): SEQ ID NO: ; DAPM_at; Start 448; Stop 472
aaatatgggtactgcggaaattctt

SEQ ID NO: 477195 - DNA, 25 bp, Artificial
  probe
  misc_feature (1)..(25): SEQ ID NO: ; DAPM_at; Start 418; Stop 442
atgtgatgtgtattccattccgctc

SEQ ID NO: 477196 - DNA, 25 bp, Artificial
  probe
  misc_feature (1)..(25): SEQ ID NO: ; DAPM_at; Start 161; Stop 185
aaacaggatatggttcaatttacga

SEQ ID NO: 477197 - DNA, 25 bp, Artificial
  probe
  misc_feature (1)..(25): SEQ ID NO: ; DAPM_at; Start 414; Stop 438
gtttatgtgatgtgtattccattcc

SEQ ID NO: 477198 - DNA, 25 bp, Artificial
  probe
  misc_feature (1)..(25): SEQ ID NO: ; DAPM_at; Start 12; Stop 36
cttataaccgtgcttctttcatgtc

SEQ ID NO: 477199 - DNA, 25 bp, Artificial
  probe
  misc_feature (1)..(25): SEQ ID NO: ; DAPM_at; Start 10; Stop 34
ttcttataaccgtgcttctttcatg

SEQ ID NO: 477200 - DNA, 25 bp, Artificial
  probe
  misc_feature (1)..(25): SEQ ID NO: ; DAPM_at; Start 164; Stop 188
caggatatggttcaatttacgactg

SEQ ID NO: 477201 - DNA, 25 bp, Artificial
  probe
  misc_feature (1)..(25): SEQ ID NO: ; DAPM_at; Start 11; Stop 35
tcttataaccgtgcttctttcatgt

SEQ ID NO: 477202 - DNA, 25 bp, Artificial
  probe
  misc_feature (1)..(25): SEQ ID NO: ; DAPM_at; Start 8; Stop 32
gattcttataaccgtgcttctttca

SEQ ID NO: 477203 - DNA, 25 bp, Artificial
  probe
  misc_feature (1)..(25): SEQ ID NO: ; DAPM_at; Start 7; Stop 31
tgattcttataaccgtgcttctttc

SEQ ID NO: 477204 - DNA, 25 bp, Artificial
  probe
  misc_feature (1)..(25): SEQ ID NO: ; LYS3_at; Start 37; Stop 61
agacgaatggagagattcatattca

SEQ ID NO: 477205 - DNA, 25 bp, Artificial
  probe
  misc_feature (1)..(25): SEQ ID NO: ; LYS3_at; Start 33; Stop 57
aactagacgaatggagagattcata

SEQ ID NO: 477206 - DNA, 25 bp, Artificial
  probe
  misc_feature (1)..(25): SEQ ID NO: ; LYS3_at; Start 38; Stop 62
gacgaatggagagattcatattcat

SEQ ID NO: 477207 - DNA, 25 bp, Artificial
  probe
  misc_feature (1)..(25): SEQ ID NO: ; LYS3_at; Start 34; Stop 58
actagacgaatggagagattcatat

SEQ ID NO: 477208 - DNA, 25 bp, Artificial
  probe
  misc_feature (1)..(25): SEQ ID NO: ; LYS3_at; Start 55; Stop 79
atattcatttgtatccaaggtgctg

SEQ ID NO: 477209 - DNA, 25 bp, Artificial
  probe
  misc_feature (1)..(25): SEQ ID NO: ; LYS3_at; Start 54; Stop 78
catattcatttgtatccaaggtgct

SEQ ID NO: 477210 - DNA, 25 bp, Artificial
  probe
  misc_feature (1)..(25): SEQ ID NO: ; LYS3_at; Start 53; Stop 77
tcatattcatttgtatccaaggtgc

SEQ ID NO: 477211 - DNA, 25 bp, Artificial
  probe
  misc_feature (1)..(25): SEQ ID NO: ; LYS3_at; Start 61; Stop 85
atttgtatccaaggtgctgaatctt

SEQ ID NO: 477212 - DNA, 25 bp, Artificial
  probe
  misc_feature (1)..(25): SEQ ID NO: ; LYS3_at; Start 56; Stop 80
tattcatttgtatccaaggtgctga

SEQ ID NO: 477213 - DNA, 25 bp, Artificial
  probe
  misc_feature (1)..(25): SEQ ID NO: ; LYS3_at; Start 60; Stop 84
catttgtatccaaggtgctgaatct

SEQ ID NO: 477214 - DNA, 25 bp, Artificial
  probe
  misc_feature (1)..(25): SEQ ID NO: ; LYS3_at; Start 36; Stop 60
tagacgaatggagagattcatattc

SEQ ID NO: 477215 - DNA, 25 bp, Artificial
  probe
  misc_feature (1)..(25): SEQ ID NO: ; LYS3_at; Start 59; Stop 83
tcatttgtatccaaggtgctgaatc

SEQ ID NO: 477216 - DNA, 25 bp, Artificial
  probe
  misc_feature (1)..(25): SEQ ID NO: ; LYS3_at; Start 35; Stop 59
ctagacgaatggagagattcatatt

SEQ ID NO: 477217 - DNA, 25 bp, Artificial
  probe
  misc_feature (1)..(25): SEQ ID NO: ; LYS3_at; Start 39; Stop 63
acgaatggagagattcatattcatt

SEQ ID NO: 477218 - DNA, 25 bp, Artificial
  probe
  misc_feature (1)..(25): SEQ ID NO: ; LYS3_at; Start 102; Stop 126
ttcgttatacggaagatgatgaacc

SEQ ID NO: 477219 - DNA, 25 bp, Artificial
  probe
  misc_feature (1)..(25): SEQ ID NO: ; LYS3_at; Start 254; Stop 278
actctttatacggttggctctcaaa

SEQ ID NO: 477220 - DNA, 25 bp, Artificial
  probe
  misc_feature (1)..(25): SEQ ID NO: ; LYS3_at; Start 253; Stop 277
aactctttatacggttggctctcaa

SEQ ID NO: 477221 - DNA, 25 bp, Artificial
  probe
  misc_feature (1)..(25): SEQ ID NO: ; LYS3_at; Start 101; Stop 125
attcgttatacggaagatgatgaac

SEQ ID NO: 477222 - DNA, 25 bp, Artificial
  probe
  misc_feature (1)..(25): SEQ ID NO: ; LYS3_at; Start 100; Stop 124
cattcgttatacggaagatgatgaa

SEQ ID NO: 477223 - DNA, 25 bp, Artificial
  probe
  misc_feature (1)..(25): SEQ ID NO: ; LYS3_at; Start 99; Stop 123
gcattcgttatacggaagatgatga

SEQ ID NO: 477224 - DNA, 25 bp, Artificial
  probe
  misc_feature (1)..(25): SEQ ID NO: ; LYS3_at; Start 32; Stop 56
aaactagacgaatggagagattcat

SEQ ID NO: 477225 - DNA, 25 bp, Artificial
  probe
  misc_feature (1)..(25): SEQ ID NO: ; LYS3_at; Start 98; Stop 122
ggcattcgttatacggaagatgatg

SEQ ID NO: 477226 - DNA, 25 bp, Artificial
  probe
  misc_feature (1)..(25): SEQ ID NO: ; LYS3_at; Start 52; Stop 76
ttcatattcatttgtatccaaggtg

SEQ ID NO: 477227 - DNA, 25 bp, Artificial
  probe
  misc_feature (1)..(25): SEQ ID NO: ; LYS3_at; Start 279; Stop 303
aagaagtggataagctgtacaatcg

SEQ ID NO: 477228 - DNA, 25 bp, Artificial
  probe
  misc_feature (1)..(25): SEQ ID NO: ; LYS3_at; Start 281; Stop 305
gaagtggataagctgtacaatcgtt

SEQ ID NO: 477229 - DNA, 25 bp, Artificial
  probe
  misc_feature (1)..(25): SEQ ID NO: ; LYS3_at; Start 280; Stop 304
agaagtggataagctgtacaatcgt

SEQ ID NO: 477230 - DNA, 25 bp, Artificial
  probe
  misc_feature (1)..(25): SEQ ID NO: ; LYS3_at; Start 87; Stop 111
gaggaggtttcggcattcgttatac

SEQ ID NO: 477231 - DNA, 25 bp, Artificial
  probe
  misc_feature (1)..(25): SEQ ID NO: ; LYS3_at; Start 58; Stop 82
ttcatttgtatccaaggtgctgaat

SEQ ID NO: 477232 - DNA, 25 bp, Artificial
  probe
  misc_feature (1)..(25): SEQ ID NO: ; LYS3_at; Start 57; Stop 81
attcatttgtatccaaggtgctgaa

SEQ ID NO: 477233 - DNA, 25 bp, Artificial
  probe
  misc_feature (1)..(25): SEQ ID NO: ; LYS3_at; Start 255; Stop 279
ctctttatacggttggctctcaaaa

SEQ ID NO: 477234 - DNA, 25 bp, Artificial
  probe
  misc_feature (1)..(25): SEQ ID NO: ; LYS3_at; Start 51; Stop 75
attcatattcatttgtatccaaggt

SEQ ID NO: 477235 - DNA, 25 bp, Artificial
  probe
  misc_feature (1)..(25): SEQ ID NO: ; LYS3_at; Start 97; Stop 121
cggcattcgttatacggaagatgat

SEQ ID NO: 477236 - DNA, 25 bp, Artificial
  probe
  misc_feature (1)..(25): SEQ ID NO: ; LYS3_at; Start 106; Stop 130
ttatacggaagatgatgaaccgctt

SEQ ID NO: 477237 - DNA, 25 bp, Artificial
  probe
  misc_feature (1)..(25): SEQ ID NO: ; LYS5_at; Start 37; Stop 61
caacatggtcatttagaaatcggag

SEQ ID NO: 477238 - DNA, 25 bp, Artificial
  probe
  misc_feature (1)..(25): SEQ ID NO: ; LYS5_at; Start 35; Stop 59
atcaacatggtcatttagaaatcgg

SEQ ID NO: 477239 - DNA, 25 bp, Artificial
  probe
  misc_feature (1)..(25): SEQ ID NO: ; LYS5_at; Start 36; Stop 60
tcaacatggtcatttagaaatcgga

SEQ ID NO: 477240 - DNA, 25 bp, Artificial
  probe
  misc_feature (1)..(25): SEQ ID NO: ; LYS5_at; Start 45; Stop 69
tcatttagaaatcggaggtgtggat

SEQ ID NO: 477241 - DNA, 25 bp, Artificial
  probe
  misc_feature (1)..(25): SEQ ID NO: ; LYS5_at; Start 245; Stop 269
agggactttctttagatgtcgtatc

SEQ ID NO: 477242 - DNA, 25 bp, Artificial
  probe
  misc_feature (1)..(25): SEQ ID NO: ; LYS5_at; Start 244; Stop 268
gagggactttctttagatgtcgtat

SEQ ID NO: 477243 - DNA, 25 bp, Artificial
  probe
  misc_feature (1)..(25): SEQ ID NO: ; LYS5_at; Start 46; Stop 70
catttagaaatcggaggtgtggatg

SEQ ID NO: 477244 - DNA, 25 bp, Artificial
  probe
  misc_feature (1)..(25): SEQ ID NO: ; LYS5_at; Start 38; Stop 62
aacatggtcatttagaaatcggagg

SEQ ID NO: 477245 - DNA, 25 bp, Artificial
  probe
  misc_feature (1)..(25): SEQ ID NO: ; LYS5_at; Start 243; Stop 267
agagggactttctttagatgtcgta

SEQ ID NO: 477246 - DNA, 25 bp, Artificial
  probe
  misc_feature (1)..(25): SEQ ID NO: ; LYS5_at; Start 83; Stop 107
cggagaaatatggtacacctcttta

SEQ ID NO: 477247 - DNA, 25 bp, Artificial
  probe
  misc_feature (1)..(25): SEQ ID NO: ; LYS5_at; Start 41; Stop 65
atggtcatttagaaatcggaggtgt

SEQ ID NO: 477248 - DNA, 25 bp, Artificial
  probe
  misc_feature (1)..(25): SEQ ID NO: ; LYS5_at; Start 78; Stop 102
tttagcggagaaatatggtacacct

SEQ ID NO: 477249 - DNA, 25 bp, Artificial
  probe
  misc_feature (1)..(25): SEQ ID NO: ; LYS5_at; Start 207; Stop 231
attctcatcagtcgcaatgattcag

SEQ ID NO: 477250 - DNA, 25 bp, Artificial
  probe
  misc_feature (1)..(25): SEQ ID NO: ; LYS5_at; Start 85; Stop 109
gagaaatatggtacacctctttacg

SEQ ID NO: 477251 - DNA, 25 bp, Artificial
  probe
  misc_feature (1)..(25): SEQ ID NO: ; LYS5_at; Start 77; Stop 101
atttagcggagaaatatggtacacc

SEQ ID NO: 477252 - DNA, 25 bp, Artificial
  probe
  misc_feature (1)..(25): SEQ ID NO: ; LYS5_at; Start 40; Stop 64
catggtcatttagaaatcggaggtg

SEQ ID NO: 477253 - DNA, 25 bp, Artificial
  probe
  misc_feature (1)..(25): SEQ ID NO: ; LYS5_at; Start 246; Stop 270
gggactttctttagatgtcgtatcc

SEQ ID NO: 477254 - DNA, 25 bp, Artificial
  probe
  misc_feature (1)..(25): SEQ ID NO: ; LYS5_at; Start 206; Stop 230
cattctcatcagtcgcaatgattca

SEQ ID NO: 477255 - DNA, 25 bp, Artificial
  probe
  misc_feature (1)..(25): SEQ ID NO: ; LYS5_at; Start 84; Stop 108
ggagaaatatggtacacctctttac

SEQ ID NO: 477256 - DNA, 25 bp, Artificial
  probe
  misc_feature (1)..(25): SEQ ID NO: ; LYS5_at; Start 34; Stop 58
aatcaacatggtcatttagaaatcg

SEQ ID NO: 477257 - DNA, 25 bp, Artificial
  probe
  misc_feature (1)..(25): SEQ ID NO: ; LYS5_at; Start 44; Stop 68
gtcatttagaaatcggaggtgtgga

SEQ ID NO: 477258 - DNA, 25 bp, Artificial
  probe
  misc_feature (1)..(25): SEQ ID NO: ; LYS5_at; Start 247; Stop 271
ggactttctttagatgtcgtatccg

SEQ ID NO: 477259 - DNA, 25 bp, Artificial
  probe
  misc_feature (1)..(25): SEQ ID NO: ; LYS5_at; Start 39; Stop 63
acatggtcatttagaaatcggaggt

SEQ ID NO: 477260 - DNA, 25 bp, Artificial
  probe
  misc_feature (1)..(25): SEQ ID NO: ; LYS5_at; Start 58; Stop 82
ggaggtgtggatgctctctatttag

SEQ ID NO: 477261 - DNA, 25 bp, Artificial
  probe
  misc_feature (1)..(25): SEQ ID NO: ; LYS5_at; Start 111; Stop 135
atatgatgtggctttaatacgtgag

SEQ ID NO: 477262 - DNA, 25 bp, Artificial
  probe
  misc_feature (1)..(25): SEQ ID NO: ; LYS5_at; Start 79; Stop 103
ttagcggagaaatatggtacacctc

SEQ ID NO: 477263 - DNA, 25 bp, Artificial
  probe
  misc_feature (1)..(25): SEQ ID NO: ; LYS5_at; Start 42; Stop 66
tggtcatttagaaatcggaggtgtg

SEQ ID NO: 477264 - DNA, 25 bp, Artificial
  probe
  misc_feature (1)..(25): SEQ ID NO: ; LYS5_at; Start 86; Stop 110
agaaatatggtacacctctttacgt

SEQ ID NO: 477265 - DNA, 25 bp, Artificial
  probe
  misc_feature (1)..(25): SEQ ID NO: ; LYS5_at; Start 238; Stop 262
gaggaagagggactttctttagatg

SEQ ID NO: 477266 - DNA, 25 bp, Artificial
  probe
  misc_feature (1)..(25): SEQ ID NO: ; LYS5_at; Start 240; Stop 264
ggaagagggactttctttagatgtc

SEQ ID NO: 477267 - DNA, 25 bp, Artificial
  probe
  misc_feature (1)..(25): SEQ ID NO: ; LYS5_at; Start 237; Stop 261
tgaggaagagggactttctttagat

SEQ ID NO: 477268 - DNA, 25 bp, Artificial
  probe
  misc_feature (1)..(25): SEQ ID NO: ; LYS5_at; Start 47; Stop 71
atttagaaatcggaggtgtggatgc

SEQ ID NO: 477269 - DNA, 25 bp, Artificial
  probe
  misc_feature (1)..(25): SEQ ID NO: ; LYS5_at; Start 239; Stop 263
aggaagagggactttctttagatgt

SEQ ID NO: 477270 - DNA, 25 bp, Artificial
  probe
  misc_feature (1)..(25): SEQ ID NO: ; LYSM_at; Start 249; Stop 273
gaacaagtattacaatcggaacaca

SEQ ID NO: 477271 - DNA, 25 bp, Artificial
  probe
  misc_feature (1)..(25): SEQ ID NO: ; LYSM_at; Start 248; Stop 272
tgaacaagtattacaatcggaacac

SEQ ID NO: 477272 - DNA, 25 bp, Artificial
  probe
  misc_feature (1)..(25): SEQ ID NO: ; LYSM_at; Start 251; Stop 275
acaagtattacaatcggaacacatt

SEQ ID NO: 477273 - DNA, 25 bp, Artificial
  probe
  misc_feature (1)..(25): SEQ ID NO: ; LYSM_at; Start 250; Stop 274
aacaagtattacaatcggaacacat

SEQ ID NO: 477274 - DNA, 25 bp, Artificial
  probe
  misc_feature (1)..(25): SEQ ID NO: ; LYSM_at; Start 255; Stop 279
gtattacaatcggaacacattcagc

SEQ ID NO: 477275 - DNA, 25 bp, Artificial
  probe
  misc_feature (1)..(25): SEQ ID NO: ; LYSM_at; Start 254; Stop 278
agtattacaatcggaacacattcag

SEQ ID NO: 477276 - DNA, 25 bp, Artificial
  probe
  misc_feature (1)..(25): SEQ ID NO: ; LYSM_at; Start 253; Stop 277
aagtattacaatcggaacacattca

SEQ ID NO: 477277 - DNA, 25 bp, Artificial
  probe
  misc_feature (1)..(25): SEQ ID NO: ; LYSM_at; Start 247; Stop 271
ttgaacaagtattacaatcggaaca

SEQ ID NO: 477278 - DNA, 25 bp, Artificial
  probe
  misc_feature (1)..(25): SEQ ID NO: ; LYSM_at; Start 252; Stop 276
caagtattacaatcggaacacattc

SEQ ID NO: 477279 - DNA, 25 bp, Artificial
  probe
  misc_feature (1)..(25): SEQ ID NO: ; LYSM_at; Start 256; Stop 280
tattacaatcggaacacattcagct

SEQ ID NO: 477280 - DNA, 25 bp, Artificial
  probe
  misc_feature (1)..(25): SEQ ID NO: ; LYSM_at; Start 165; Stop 189
catacgcatgactacattacaacgg

SEQ ID NO: 477281 - DNA, 25 bp, Artificial
  probe
  misc_feature (1)..(25): SEQ ID NO: ; LYSM_at; Start 94; Stop 118
ttgaagacctatgtaaagaaacggg

SEQ ID NO: 477282 - DNA, 25 bp, Artificial
  probe
  misc_feature (1)..(25): SEQ ID NO: ; LYSM_at; Start 93; Stop 117
cttgaagacctatgtaaagaaacgg

SEQ ID NO: 477283 - DNA, 25 bp, Artificial
  probe
  misc_feature (1)..(25): SEQ ID NO: ; LYSM_at; Start 3; Stop 27
gaaacaataagagcagggaagaact

SEQ ID NO: 477284 - DNA, 25 bp, Artificial
  probe
  misc_feature (1)..(25): SEQ ID NO: ; LYSM_at; Start 244; Stop 268
ccattgaacaagtattacaatcgga

SEQ ID NO: 477285 - DNA, 25 bp, Artificial
  probe
  misc_feature (1)..(25): SEQ ID NO: ; LYSM_at; Start 74; Stop 98
ttctatgaaatcgtcgcttcttgaa

SEQ ID NO: 477286 - DNA, 25 bp, Artificial
  probe
  misc_feature (1)..(25): SEQ ID NO: ; LYSM_at; Start 243; Stop 267
gccattgaacaagtattacaatcgg

SEQ ID NO: 477287 - DNA, 25 bp, Artificial
  probe
  misc_feature (1)..(25): SEQ ID NO: ; LYSM_at; Start 57; Stop 81
gcattgtggtggataatttctatga

SEQ ID NO: 477288 - DNA, 25 bp, Artificial
  probe
  misc_feature (1)..(25): SEQ ID NO: ; LYSM_at; Start 164; Stop 188
gcatacgcatgactacattacaacg

SEQ ID NO: 477289 - DNA, 25 bp, Artificial
  probe
  misc_feature (1)..(25): SEQ ID NO: ; LYSM_at; Start 163; Stop 187
cgcatacgcatgactacattacaac

SEQ ID NO: 477290 - DNA, 25 bp, Artificial
  probe
  misc_feature (1)..(25): SEQ ID NO: ; LYSM_at; Start 2; Stop 26
ggaaacaataagagcagggaagaac

SEQ ID NO: 477291 - DNA, 25 bp, Artificial
  probe
  misc_feature (1)..(25): SEQ ID NO: ; LYSM_at; Start 103; Stop 127
tatgtaaagaaacgggtcactccat

SEQ ID NO: 477292 - DNA, 25 bp, Artificial
  probe
  misc_feature (1)..(25): SEQ ID NO: ; LYSM_at; Start 87; Stop 111
tcgcttcttgaagacctatgtaaag

SEQ ID NO: 477293 - DNA, 25 bp, Artificial
  probe
  misc_feature (1)..(25): SEQ ID NO: ; LYSM_at; Start 1; Stop 25
tggaaacaataagagcagggaagaa

SEQ ID NO: 477294 - DNA, 25 bp, Artificial
  probe
  misc_feature (1)..(25): SEQ ID NO: ; LYSM_at; Start 192; Stop 216
caggaagattcaaagtttggtttcg

SEQ ID NO: 477295 - DNA, 25 bp, Artificial
  probe
  misc_feature (1)..(25): SEQ ID NO: ; LYSM_at; Start 102; Stop 126
ctatgtaaagaaacgggtcactcca

SEQ ID NO: 477296 - DNA, 25 bp, Artificial
  probe
  misc_feature (1)..(25): SEQ ID NO: ; LYSM_at; Start 75; Stop 99
tctatgaaatcgtcgcttcttgaag

SEQ ID NO: 477297 - DNA, 25 bp, Artificial
  probe
  misc_feature (1)..(25): SEQ ID NO: ; LYSM_at; Start 85; Stop 109
cgtcgcttcttgaagacctatgtaa

SEQ ID NO: 477298 - DNA, 25 bp, Artificial
  probe
  misc_feature (1)..(25): SEQ ID NO: ; LYSM_at; Start 76; Stop 100
ctatgaaatcgtcgcttcttgaaga

SEQ ID NO: 477299 - DNA, 25 bp, Artificial
  probe
  misc_feature (1)..(25): SEQ ID NO: ; LYSM_at; Start 246; Stop 270
attgaacaagtattacaatcggaac

SEQ ID NO: 477300 - DNA, 25 bp, Artificial
  probe
  misc_feature (1)..(25): SEQ ID NO: ; LYSM_at; Start 245; Stop 269
cattgaacaagtattacaatcggaa

SEQ ID NO: 477301 - DNA, 25 bp, Artificial
  probe
  misc_feature (1)..(25): SEQ ID NO: ; LYSM_at; Start 4; Stop 28
aaacaataagagcagggaagaactg

SEQ ID NO: 477302 - DNA, 25 bp, Artificial
  probe
  misc_feature (1)..(25): SEQ ID NO: ; LYSM_at; Start 82; Stop 106
aatcgtcgcttcttgaagacctatg

SEQ ID NO: 477303 - DNA, 25 bp, Artificial
  probe
  misc_feature (1)..(25): SEQ ID NO: ; PHE3_at; Start 51; Stop 75
atggcagcttctacatacgaattaa

SEQ ID NO: 477304 - DNA, 25 bp, Artificial
  probe
  misc_feature (1)..(25): SEQ ID NO: ; PHE3_at; Start 353; Stop 377
gtttgatgatgtattgattccaggg

SEQ ID NO: 477305 - DNA, 25 bp, Artificial
  probe
  misc_feature (1)..(25): SEQ ID NO: ; PHE3_at; Start 349; Stop 373
aagcgtttgatgatgtattgattcc

SEQ ID NO: 477306 - DNA, 25 bp, Artificial
  probe
  misc_feature (1)..(25): SEQ ID NO: ; PHE3_at; Start 345; Stop 369
gagaaagcgtttgatgatgtattga

SEQ ID NO: 477307 - DNA, 25 bp, Artificial
  probe
  misc_feature (1)..(25): SEQ ID NO: ; PHE3_at; Start 352; Stop 376
cgtttgatgatgtattgattccagg

SEQ ID NO: 477308 - DNA, 25 bp, Artificial
  probe
  misc_feature (1)..(25): SEQ ID NO: ; PHE3_at; Start 344; Stop 368
tgagaaagcgtttgatgatgtattg

SEQ ID NO: 477309 - DNA, 25 bp, Artificial
  probe
  misc_feature (1)..(25): SEQ ID NO: ; PHE3_at; Start 343; Stop 367
ttgagaaagcgtttgatgatgtatt

SEQ ID NO: 477310 - DNA, 25 bp, Artificial
  probe
  misc_feature (1)..(25): SEQ ID NO: ; PHE3_at; Start 85; Stop 109
aacgggatatacaggattataggga

SEQ ID NO: 477311 - DNA, 25 bp, Artificial
  probe
  misc_feature (1)..(25): SEQ ID NO: ; PHE3_at; Start 346; Stop 370
agaaagcgtttgatgatgtattgat

SEQ ID NO: 477312 - DNA, 25 bp, Artificial
  probe
  misc_feature (1)..(25): SEQ ID NO: ; PHE3_at; Start 342; Stop 366
attgagaaagcgtttgatgatgtat

SEQ ID NO: 477313 - DNA, 25 bp, Artificial
  probe
  misc_feature (1)..(25): SEQ ID NO: ; PHE3_at; Start 87; Stop 111
cgggatatacaggattatagggaca

SEQ ID NO: 477314 - DNA, 25 bp, Artificial
  probe
  misc_feature (1)..(25): SEQ ID NO: ; PHE3_at; Start 86; Stop 110
acgggatatacaggattatagggac

SEQ ID NO: 477315 - DNA, 25 bp, Artificial
  probe
  misc_feature (1)..(25): SEQ ID NO: ; PHE3_at; Start 340; Stop 364
atattgagaaagcgtttgatgatgt

SEQ ID NO: 477316 - DNA, 25 bp, Artificial
  probe
  misc_feature (1)..(25): SEQ ID NO: ; PHE3_at; Start 337; Stop 361
ttgatattgagaaagcgtttgatga

SEQ ID NO: 477317 - DNA, 25 bp, Artificial
  probe
  misc_feature (1)..(25): SEQ ID NO: ; PHE3_at; Start 351; Stop 375
gcgtttgatgatgtattgattccag

SEQ ID NO: 477318 - DNA, 25 bp, Artificial
  probe
  misc_feature (1)..(25): SEQ ID NO: ; PHE3_at; Start 84; Stop 108
aaacgggatatacaggattataggg

SEQ ID NO: 477319 - DNA, 25 bp, Artificial
  probe
  misc_feature (1)..(25): SEQ ID NO: ; PHE3_at; Start 338; Stop 362
tgatattgagaaagcgtttgatgat

SEQ ID NO: 477320 - DNA, 25 bp, Artificial
  probe
  misc_feature (1)..(25): SEQ ID NO: ; PHE3_at; Start 350; Stop 374
agcgtttgatgatgtattgattcca

SEQ ID NO: 477321 - DNA, 25 bp, Artificial
  probe
  misc_feature (1)..(25): SEQ ID NO: ; PHE3_at; Start 341; Stop 365
tattgagaaagcgtttgatgatgta

SEQ ID NO: 477322 - DNA, 25 bp, Artificial
  probe
  misc_feature (1)..(25): SEQ ID NO: ; PHE3_at; Start 339; Stop 363
gatattgagaaagcgtttgatgatg

SEQ ID NO: 477323 - DNA, 25 bp, Artificial
  probe
  misc_feature (1)..(25): SEQ ID NO: ; PHE3_at; Start 348; Stop 372
aaagcgtttgatgatgtattgattc

SEQ ID NO: 477324 - DNA, 25 bp, Artificial
  probe
  misc_feature (1)..(25): SEQ ID NO: ; PHE3_at; Start 347; Stop 371
gaaagcgtttgatgatgtattgatt

SEQ ID NO: 477325 - DNA, 25 bp, Artificial
  probe
  misc_feature (1)..(25): SEQ ID NO: ; PHE3_at; Start 49; Stop 73
atatggcagcttctacatacgaatt

SEQ ID NO: 477326 - DNA, 25 bp, Artificial
  probe
  misc_feature (1)..(25): SEQ ID NO: ; PHE3_at; Start 88; Stop 112
gggatatacaggattatagggacaa

SEQ ID NO: 477327 - DNA, 25 bp, Artificial
  probe
  misc_feature (1)..(25): SEQ ID NO: ; PHE3_at; Start 50; Stop 74
tatggcagcttctacatacgaatta

SEQ ID NO: 477328 - DNA, 25 bp, Artificial
  probe
  misc_feature (1)..(25): SEQ ID NO: ; PHE3_at; Start 44; Stop 68
caatgatatggcagcttctacatac

SEQ ID NO: 477329 - DNA, 25 bp, Artificial
  probe
  misc_feature (1)..(25): SEQ ID NO: ; PHE3_at; Start 424; Stop 448
gtgcataccagtcttaccaattata

SEQ ID NO: 477330 - DNA, 25 bp, Artificial
  probe
  misc_feature (1)..(25): SEQ ID NO: ; PHE3_at; Start 336; Stop 360
attgatattgagaaagcgtttgatg

SEQ ID NO: 477331 - DNA, 25 bp, Artificial
  probe
  misc_feature (1)..(25): SEQ ID NO: ; PHE3_at; Start 48; Stop 72
gatatggcagcttctacatacgaat

SEQ ID NO: 477332 - DNA, 25 bp, Artificial
  probe
  misc_feature (1)..(25): SEQ ID NO: ; PHE3_at; Start 45; Stop 69
aatgatatggcagcttctacatacg

SEQ ID NO: 477333 - DNA, 25 bp, Artificial
  probe
  misc_feature (1)..(25): SEQ ID NO: ; PHE3_at; Start 122; Stop 146
atttgttatcctgtctcccgatgaa

SEQ ID NO: 477334 - DNA, 25 bp, Artificial
  probe
  misc_feature (1)..(25): SEQ ID NO: ; PHE3_at; Start 83; Stop 107
gaaacgggatatacaggattatagg

SEQ ID NO: 477335 - DNA, 25 bp, Artificial
  probe
  misc_feature (1)..(25): SEQ ID NO: ; PHE3_at; Start 119; Stop 143
aagatttgttatcctgtctcccgat

SEQ ID NO: 477336 - DNA, 25 bp, Artificial
  probe
  misc_feature (1)..(25): SEQ ID NO: ; PHE5_at; Start 214; Stop 238
ttctttcatttggaggataggtcag

SEQ ID NO: 477337 - DNA, 25 bp, Artificial
  probe
  misc_feature (1)..(25): SEQ ID NO: ; PHE5_at; Start 213; Stop 237
tttctttcatttggaggataggtca

SEQ ID NO: 477338 - DNA, 25 bp, Artificial
  probe
  misc_feature (1)..(25): SEQ ID NO: ; PHE5_at; Start 355; Stop 379
gcaatggaagaagacattcatacat

SEQ ID NO: 477339 - DNA, 25 bp, Artificial
  probe
  misc_feature (1)..(25): SEQ ID NO: ; PHE5_at; Start 354; Stop 378
ggcaatggaagaagacattcataca

SEQ ID NO: 477340 - DNA, 25 bp, Artificial
  probe
  misc_feature (1)..(25): SEQ ID NO: ; PHE5_at; Start 215; Stop 239
tctttcatttggaggataggtcagg

SEQ ID NO: 477341 - DNA, 25 bp, Artificial
  probe
  misc_feature (1)..(25): SEQ ID NO: ; PHE5_at; Start 216; Stop 240
ctttcatttggaggataggtcaggt

SEQ ID NO: 477342 - DNA, 25 bp, Artificial
  probe
  misc_feature (1)..(25): SEQ ID NO: ; PHE5_at; Start 217; Stop 241
tttcatttggaggataggtcaggtg

SEQ ID NO: 477343 - DNA, 25 bp, Artificial
  probe
  misc_feature (1)..(25): SEQ ID NO: ; PHE5_at; Start 286; Stop 310
gttctttccattcaccagaccattc

SEQ ID NO: 477344 - DNA, 25 bp, Artificial
  probe
  misc_feature (1)..(25): SEQ ID NO: ; PHE5_at; Start 353; Stop 377
cggcaatggaagaagacattcatac

SEQ ID NO: 477345 - DNA, 25 bp, Artificial
  probe
  misc_feature (1)..(25): SEQ ID NO: ; PHE5_at; Start 352; Stop 376
tcggcaatggaagaagacattcata

SEQ ID NO: 477346 - DNA, 25 bp, Artificial
  probe
  misc_feature (1)..(25): SEQ ID NO: ; PHE5_at; Start 356; Stop 380
caatggaagaagacattcatacatt

SEQ ID NO: 477347 - DNA, 25 bp, Artificial
  probe
  misc_feature (1)..(25): SEQ ID NO: ; PHE5_at; Start 358; Stop 382
atggaagaagacattcatacattaa

SEQ ID NO: 477348 - DNA, 25 bp, Artificial
  probe
  misc_feature (1)..(25): SEQ ID NO: ; PHE5_at; Start 123; Stop 147
aaaggtcgatttaagtagaagtgcg

SEQ ID NO: 477349 - DNA, 25 bp, Artificial
  probe
  misc_feature (1)..(25): SEQ ID NO: ; PHE5_at; Start 126; Stop 150
ggtcgatttaagtagaagtgcgttt

SEQ ID NO: 477350 - DNA, 25 bp, Artificial
  probe
  misc_feature (1)..(25): SEQ ID NO: ; PHE5_at; Start 287; Stop 311
ttctttccattcaccagaccattcc

SEQ ID NO: 477351 - DNA, 25 bp, Artificial
  probe
  misc_feature (1)..(25): SEQ ID NO: ; PHE5_at; Start 323; Stop 347
gagcaaatgtgacactgtctatcag

SEQ ID NO: 477352 - DNA, 25 bp, Artificial
  probe
  misc_feature (1)..(25): SEQ ID NO: ; PHE5_at; Start 321; Stop 345
cagagcaaatgtgacactgtctatc

SEQ ID NO: 477353 - DNA, 25 bp, Artificial
  probe
  misc_feature (1)..(25): SEQ ID NO: ; PHE5_at; Start 207; Stop 231
cacacttttctttcatttggaggat

SEQ ID NO: 477354 - DNA, 25 bp, Artificial
  probe
  misc_feature (1)..(25): SEQ ID NO: ; PHE5_at; Start 205; Stop 229
atcacacttttctttcatttggagg

SEQ ID NO: 477355 - DNA, 25 bp, Artificial
  probe
  misc_feature (1)..(25): SEQ ID NO: ; PHE5_at; Start 322; Stop 346
agagcaaatgtgacactgtctatca

SEQ ID NO: 477356 - DNA, 25 bp, Artificial
  probe
  misc_feature (1)..(25): SEQ ID NO: ; PHE5_at; Start 125; Stop 149
aggtcgatttaagtagaagtgcgtt

SEQ ID NO: 477357 - DNA, 25 bp, Artificial
  probe
  misc_feature (1)..(25): SEQ ID NO: ; PHE5_at; Start 124; Stop 148
aaggtcgatttaagtagaagtgcgt

SEQ ID NO: 477358 - DNA, 25 bp, Artificial
  probe
  misc_feature (1)..(25): SEQ ID NO: ; PHE5_at; Start 206; Stop 230
tcacacttttctttcatttggagga

SEQ ID NO: 477359 - DNA, 25 bp, Artificial
  probe
  misc_feature (1)..(25): SEQ ID NO: ; PHE5_at; Start 226; Stop 250
gaggataggtcaggtgcgttatctc

SEQ ID NO: 477360 - DNA, 25 bp, Artificial
  probe
  misc_feature (1)..(25): SEQ ID NO: ; PHE5_at; Start 212; Stop 236
ttttctttcatttggaggataggtc

SEQ ID NO: 477361 - DNA, 25 bp, Artificial
  probe
  misc_feature (1)..(25): SEQ ID NO: ; PHE5_at; Start 211; Stop 235
cttttctttcatttggaggataggt

SEQ ID NO: 477362 - DNA, 25 bp, Artificial
  probe
  misc_feature (1)..(25): SEQ ID NO: ; PHE5_at; Start 210; Stop 234
acttttctttcatttggaggatagg

SEQ ID NO: 477363 - DNA, 25 bp, Artificial
  probe
  misc_feature (1)..(25): SEQ ID NO: ; PHE5_at; Start 359; Stop 383
tggaagaagacattcatacattaat

SEQ ID NO: 477364 - DNA, 25 bp, Artificial
  probe
  misc_feature (1)..(25): SEQ ID NO: ; PHE5_at; Start 208; Stop 232
acacttttctttcatttggaggata

SEQ ID NO: 477365 - DNA, 25 bp, Artificial
  probe
  misc_feature (1)..(25): SEQ ID NO: ; PHE5_at; Start 99; Stop 123
agattcagtagcagatgccgttcaa

SEQ ID NO: 477366 - DNA, 25 bp, Artificial
  probe
  misc_feature (1)..(25): SEQ ID NO: ; PHE5_at; Start 244; Stop 268
ttatctcagcttcttcaggcggtag

SEQ ID NO: 477367 - DNA, 25 bp, Artificial
  probe
  misc_feature (1)..(25): SEQ ID NO: ; PHE5_at; Start 228; Stop 252
ggataggtcaggtgcgttatctcag

SEQ ID NO: 477368 - DNA, 25 bp, Artificial
  probe
  misc_feature (1)..(25): SEQ ID NO: ; PHE5_at; Start 285; Stop 309
cgttctttccattcaccagaccatt

SEQ ID NO: 477369 - DNA, 25 bp, Artificial
  probe
  misc_feature (1)..(25): SEQ ID NO: ; PHEM_at; Start 79; Stop 103
ttacacatctagcagtcagttcttg

SEQ ID NO: 477370 - DNA, 25 bp, Artificial
  probe
  misc_feature (1)..(25): SEQ ID NO: ; PHEM_at; Start 80; Stop 104
tacacatctagcagtcagttcttgt

SEQ ID NO: 477371 - DNA, 25 bp, Artificial
  probe
  misc_feature (1)..(25): SEQ ID NO: ; PHEM_at; Start 45; Stop 69
atgaaagtcggttatttaggtccag

SEQ ID NO: 477372 - DNA, 25 bp, Artificial
  probe
  misc_feature (1)..(25): SEQ ID NO: ; PHEM_at; Start 81; Stop 105
acacatctagcagtcagttcttgtt

SEQ ID NO: 477373 - DNA, 25 bp, Artificial
  probe
  misc_feature (1)..(25): SEQ ID NO: ; PHEM_at; Start 78; Stop 102
tttacacatctagcagtcagttctt

SEQ ID NO: 477374 - DNA, 25 bp, Artificial
  probe
  misc_feature (1)..(25): SEQ ID NO: ; PHEM_at; Start 76; Stop 100
catttacacatctagcagtcagttc

SEQ ID NO: 477375 - DNA, 25 bp, Artificial
  probe
  misc_feature (1)..(25): SEQ ID NO: ; PHEM_at; Start 75; Stop 99
acatttacacatctagcagtcagtt

SEQ ID NO: 477376 - DNA, 25 bp, Artificial
  probe
  misc_feature (1)..(25): SEQ ID NO: ; PHEM_at; Start 77; Stop 101
atttacacatctagcagtcagttct

SEQ ID NO: 477377 - DNA, 25 bp, Artificial
  probe
  misc_feature (1)..(25): SEQ ID NO: ; PHEM_at; Start 74; Stop 98
tacatttacacatctagcagtcagt

SEQ ID NO: 477378 - DNA, 25 bp, Artificial
  probe
  misc_feature (1)..(25): SEQ ID NO: ; PHEM_at; Start 73; Stop 97
ctacatttacacatctagcagtcag

SEQ ID NO: 477379 - DNA, 25 bp, Artificial
  probe
  misc_feature (1)..(25): SEQ ID NO: ; PHEM_at; Start 241; Stop 265
atttaatacatgaacagcctttgcc

SEQ ID NO: 477380 - DNA, 25 bp, Artificial
  probe
  misc_feature (1)..(25): SEQ ID NO: ; PHEM_at; Start 44; Stop 68
catgaaagtcggttatttaggtcca

SEQ ID NO: 477381 - DNA, 25 bp, Artificial
  probe
  misc_feature (1)..(25): SEQ ID NO: ; PHEM_at; Start 244; Stop 268
taatacatgaacagcctttgccaat

SEQ ID NO: 477382 - DNA, 25 bp, Artificial
  probe
  misc_feature (1)..(25): SEQ ID NO: ; PHEM_at; Start 243; Stop 267
ttaatacatgaacagcctttgccaa

SEQ ID NO: 477383 - DNA, 25 bp, Artificial
  probe
  misc_feature (1)..(25): SEQ ID NO: ; PHEM_at; Start 242; Stop 266
tttaatacatgaacagcctttgcca

SEQ ID NO: 477384 - DNA, 25 bp, Artificial
  probe
  misc_feature (1)..(25): SEQ ID NO: ; PHEM_at; Start 82; Stop 106
cacatctagcagtcagttcttgttt

SEQ ID NO: 477385 - DNA, 25 bp, Artificial
  probe
  misc_feature (1)..(25): SEQ ID NO: ; PHEM_at; Start 56; Stop 80
ttatttaggtccagcagctacattt

SEQ ID NO: 477386 - DNA, 25 bp, Artificial
  probe
  misc_feature (1)..(25): SEQ ID NO: ; PHEM_at; Start 57; Stop 81
tatttaggtccagcagctacattta

SEQ ID NO: 477387 - DNA, 25 bp, Artificial
  probe
  misc_feature (1)..(25): SEQ ID NO: ; PHEM_at; Start 240; Stop 264
tatttaatacatgaacagcctttgc

SEQ ID NO: 477388 - DNA, 25 bp, Artificial
  probe
  misc_feature (1)..(25): SEQ ID NO: ; PHEM_at; Start 58; Stop 82
atttaggtccagcagctacatttac

SEQ ID NO: 477389 - DNA, 25 bp, Artificial
  probe
  misc_feature (1)..(25): SEQ ID NO: ; PHEM_at; Start 55; Stop 79
gttatttaggtccagcagctacatt

SEQ ID NO: 477390 - DNA, 25 bp, Artificial
  probe
  misc_feature (1)..(25): SEQ ID NO: ; PHEM_at; Start 381; Stop 405
tgccataaatttcttcatcgacatt

SEQ ID NO: 477391 - DNA, 25 bp, Artificial
  probe
  misc_feature (1)..(25): SEQ ID NO: ; PHEM_at; Start 66; Stop 90
ccagcagctacatttacacatctag

SEQ ID NO: 477392 - DNA, 25 bp, Artificial
  probe
  misc_feature (1)..(25): SEQ ID NO: ; PHEM_at; Start 7; Stop 31
aatattaggttcaggtgcataaggg

SEQ ID NO: 477393 - DNA, 25 bp, Artificial
  probe
  misc_feature (1)..(25): SEQ ID NO: ; PHEM_at; Start 48; Stop 72
aaagtcggttatttaggtccagcag

SEQ ID NO: 477394 - DNA, 25 bp, Artificial
  probe
  misc_feature (1)..(25): SEQ ID NO: ; PHEM_at; Start 47; Stop 71
gaaagtcggttatttaggtccagca

SEQ ID NO: 477395 - DNA, 25 bp, Artificial
  probe
  misc_feature (1)..(25): SEQ ID NO: ; PHEM_at; Start 46; Stop 70
tgaaagtcggttatttaggtccagc

SEQ ID NO: 477396 - DNA, 25 bp, Artificial
  probe
  misc_feature (1)..(25): SEQ ID NO: ; PHEM_at; Start 379; Stop 403
aatgccataaatttcttcatcgaca

SEQ ID NO: 477397 - DNA, 25 bp, Artificial
  probe
  misc_feature (1)..(25): SEQ ID NO: ; PHEM_at; Start 65; Stop 89
tccagcagctacatttacacatcta

SEQ ID NO: 477398 - DNA, 25 bp, Artificial
  probe
  misc_feature (1)..(25): SEQ ID NO: ; PHEM_at; Start 380; Stop 404
atgccataaatttcttcatcgacat

SEQ ID NO: 477399 - DNA, 25 bp, Artificial
  probe
  misc_feature (1)..(25): SEQ ID NO: ; PHEM_at; Start 378; Stop 402
caatgccataaatttcttcatcgac

SEQ ID NO: 477400 - DNA, 25 bp, Artificial
  probe
  misc_feature (1)..(25): SEQ ID NO: ; PHEM_at; Start 236; Stop 260
agactatttaatacatgaacagcct

SEQ ID NO: 477401 - DNA, 25 bp, Artificial
  probe
  misc_feature (1)..(25): SEQ ID NO: ; PHEM_at; Start 377; Stop 401
gcaatgccataaatttcttcatcga

SEQ ID NO: 477402 - DNA, 25 bp, Artificial
  probe
  misc_feature (1)..(25): SEQ ID NO: ; THR3_at; Start 332; Stop 356
atgaagaaggatatgttccatcagc

SEQ ID NO: 477403 - DNA, 25 bp, Artificial
  probe
  misc_feature (1)..(25): SEQ ID NO: ; THR3_at; Start 548; Stop 572
ccgaaagagggaagtataatagagc

SEQ ID NO: 477404 - DNA, 25 bp, Artificial
  probe
  misc_feature (1)..(25): SEQ ID NO: ; THR3_at; Start 550; Stop 574
gaaagagggaagtataatagagcga

SEQ ID NO: 477405 - DNA, 25 bp, Artificial
  probe
  misc_feature (1)..(25): SEQ ID NO: ; THR3_at; Start 549; Stop 573
cgaaagagggaagtataatagagcg

SEQ ID NO: 477406 - DNA, 25 bp, Artificial
  probe
  misc_feature (1)..(25): SEQ ID NO: ; THR3_at; Start 331; Stop 355
catgaagaaggatatgttccatcag

SEQ ID NO: 477407 - DNA, 25 bp, Artificial
  probe
  misc_feature (1)..(25): SEQ ID NO: ; THR3_at; Start 552; Stop 576
aagagggaagtataatagagcgaaa

SEQ ID NO: 477408 - DNA, 25 bp, Artificial
  probe
  misc_feature (1)..(25): SEQ ID NO: ; THR3_at; Start 551; Stop 575
aaagagggaagtataatagagcgaa

SEQ ID NO: 477409 - DNA, 25 bp, Artificial
  probe
  misc_feature (1)..(25): SEQ ID NO: ; THR3_at; Start 553; Stop 577
agagggaagtataatagagcgaaat

SEQ ID NO: 477410 - DNA, 25 bp, Artificial
  probe
  misc_feature (1)..(25): SEQ ID NO: ; THR3_at; Start 554; Stop 578
gagggaagtataatagagcgaaatc

SEQ ID NO: 477411 - DNA, 25 bp, Artificial
  probe
  misc_feature (1)..(25): SEQ ID NO: ; THR3_at; Start 511; Stop 535
tcatttccctcattgtgaagtagac

SEQ ID NO: 477412 - DNA, 25 bp, Artificial
  probe
  misc_feature (1)..(25): SEQ ID NO: ; THR3_at; Start 333; Stop 357
tgaagaaggatatgttccatcagcc

SEQ ID NO: 477413 - DNA, 25 bp, Artificial
  probe
  misc_feature (1)..(25): SEQ ID NO: ; THR3_at; Start 278; Stop 302
aatatcctcattgctgcgatcatgt

SEQ ID NO: 477414 - DNA, 25 bp, Artificial
  probe
  misc_feature (1)..(25): SEQ ID NO: ; THR3_at; Start 512; Stop 536
catttccctcattgtgaagtagacg

SEQ ID NO: 477415 - DNA, 25 bp, Artificial
  probe
  misc_feature (1)..(25): SEQ ID NO: ; THR3_at; Start 279; Stop 303
atatcctcattgctgcgatcatgtc

SEQ ID NO: 477416 - DNA, 25 bp, Artificial
  probe
  misc_feature (1)..(25): SEQ ID NO: ; THR3_at; Start 556; Stop 580
gggaagtataatagagcgaaatcct

SEQ ID NO: 477417 - DNA, 25 bp, Artificial
  probe
  misc_feature (1)..(25): SEQ ID NO: ; THR3_at; Start 555; Stop 579
agggaagtataatagagcgaaatcc

SEQ ID NO: 477418 - DNA, 25 bp, Artificial
  probe
  misc_feature (1)..(25): SEQ ID NO: ; THR3_at; Start 568; Stop 592
agagcgaaatcctttatatcaagta

SEQ ID NO: 477419 - DNA, 25 bp, Artificial
  probe
  misc_feature (1)..(25): SEQ ID NO: ; THR3_at; Start 567; Stop 591
tagagcgaaatcctttatatcaagt

SEQ ID NO: 477420 - DNA, 25 bp, Artificial
  probe
  misc_feature (1)..(25): SEQ ID NO: ; THR3_at; Start 547; Stop 571
tccgaaagagggaagtataatagag

SEQ ID NO: 477421 - DNA, 25 bp, Artificial
  probe
  misc_feature (1)..(25): SEQ ID NO: ; THR3_at; Start 519; Stop 543
ctcattgtgaagtagacgctttgac

SEQ ID NO: 477422 - DNA, 25 bp, Artificial
  probe
  misc_feature (1)..(25): SEQ ID NO: ; THR3_at; Start 336; Stop 360
agaaggatatgttccatcagccgta

SEQ ID NO: 477423 - DNA, 25 bp, Artificial
  probe
  misc_feature (1)..(25): SEQ ID NO: ; THR3_at; Start 334; Stop 358
gaagaaggatatgttccatcagccg

SEQ ID NO: 477424 - DNA, 25 bp, Artificial
  probe
  misc_feature (1)..(25): SEQ ID NO: ; THR3_at; Start 337; Stop 361
gaaggatatgttccatcagccgtac

SEQ ID NO: 477425 - DNA, 25 bp, Artificial
  probe
  misc_feature (1)..(25): SEQ ID NO: ; THR3_at; Start 277; Stop 301
caatatcctcattgctgcgatcatg

SEQ ID NO: 477426 - DNA, 25 bp, Artificial
  probe
  misc_feature (1)..(25): SEQ ID NO: ; THR3_at; Start 1; Stop 25
ggctgatgaattatgcggcttaaag

SEQ ID NO: 477427 - DNA, 25 bp, Artificial
  probe
  misc_feature (1)..(25): SEQ ID NO: ; THR3_at; Start 557; Stop 581
ggaagtataatagagcgaaatcctt

SEQ ID NO: 477428 - DNA, 25 bp, Artificial
  probe
  misc_feature (1)..(25): SEQ ID NO: ; THR3_at; Start 569; Stop 593
gagcgaaatcctttatatcaagtaa

SEQ ID NO: 477429 - DNA, 25 bp, Artificial
  probe
  misc_feature (1)..(25): SEQ ID NO: ; THR3_at; Start 558; Stop 582
gaagtataatagagcgaaatccttt

SEQ ID NO: 477430 - DNA, 25 bp, Artificial
  probe
  misc_feature (1)..(25): SEQ ID NO: ; THR3_at; Start 518; Stop 542
cctcattgtgaagtagacgctttga

SEQ ID NO: 477431 - DNA, 25 bp, Artificial
  probe
  misc_feature (1)..(25): SEQ ID NO: ; THR3_at; Start 513; Stop 537
atttccctcattgtgaagtagacgc

SEQ ID NO: 477432 - DNA, 25 bp, Artificial
  probe
  misc_feature (1)..(25): SEQ ID NO: ; THR3_at; Start 192; Stop 216
tttatgaagtgctgacaagagacgc

SEQ ID NO: 477433 - DNA, 25 bp, Artificial
  probe
  misc_feature (1)..(25): SEQ ID NO: ; THR3_at; Start 123; Stop 147
atgaggatgacgagacccaaatgat

SEQ ID NO: 477434 - DNA, 25 bp, Artificial
  probe
  misc_feature (1)..(25): SEQ ID NO: ; THR3_at; Start 566; Stop 590
atagagcgaaatcctttatatcaag

SEQ ID NO: 477435 - DNA, 25 bp, Artificial
  probe
  misc_feature (1)..(25): SEQ ID NO: ; THR5_at; Start 212; Stop 236
aagaagaaggcaatgacacgattat

SEQ ID NO: 477436 - DNA, 25 bp, Artificial
  probe
  misc_feature (1)..(25): SEQ ID NO: ; THR5_at; Start 213; Stop 237
agaagaaggcaatgacacgattatg

SEQ ID NO: 477437 - DNA, 25 bp, Artificial
  probe
  misc_feature (1)..(25): SEQ ID NO: ; THR5_at; Start 214; Stop 238
gaagaaggcaatgacacgattatgt

SEQ ID NO: 477438 - DNA, 25 bp, Artificial
  probe
  misc_feature (1)..(25): SEQ ID NO: ; THR5_at; Start 215; Stop 239
aagaaggcaatgacacgattatgtg

SEQ ID NO: 477439 - DNA, 25 bp, Artificial
  probe
  misc_feature (1)..(25): SEQ ID NO: ; THR5_at; Start 211; Stop 235
aaagaagaaggcaatgacacgatta

SEQ ID NO: 477440 - DNA, 25 bp, Artificial
  probe
  misc_feature (1)..(25): SEQ ID NO: ; THR5_at; Start 63; Stop 87
gctaactttacatgaaggaaacaca

SEQ ID NO: 477441 - DNA, 25 bp, Artificial
  probe
  misc_feature (1)..(25): SEQ ID NO: ; THR5_at; Start 65; Stop 89
taactttacatgaaggaaacacacc

SEQ ID NO: 477442 - DNA, 25 bp, Artificial
  probe
  misc_feature (1)..(25): SEQ ID NO: ; THR5_at; Start 62; Stop 86
cgctaactttacatgaaggaaacac

SEQ ID NO: 477443 - DNA, 25 bp, Artificial
  probe
  misc_feature (1)..(25): SEQ ID NO: ; THR5_at; Start 64; Stop 88
ctaactttacatgaaggaaacacac

SEQ ID NO: 477444 - DNA, 25 bp, Artificial
  probe
  misc_feature (1)..(25): SEQ ID NO: ; THR5_at; Start 577; Stop 601
tactggaagggcttcaaggaatatc

SEQ ID NO: 477445 - DNA, 25 bp, Artificial
  probe
  misc_feature (1)..(25): SEQ ID NO: ; THR5_at; Start 76; Stop 100
gaaggaaacacacctcttattcacc

SEQ ID NO: 477446 - DNA, 25 bp, Artificial
  probe
  misc_feature (1)..(25): SEQ ID NO: ; THR5_at; Start 73; Stop 97
catgaaggaaacacacctcttattc

SEQ ID NO: 477447 - DNA, 25 bp, Artificial
  probe
  misc_feature (1)..(25): SEQ ID NO: ; THR5_at; Start 72; Stop 96
acatgaaggaaacacacctcttatt

SEQ ID NO: 477448 - DNA, 25 bp, Artificial
  probe
  misc_feature (1)..(25): SEQ ID NO: ; THR5_at; Start 70; Stop 94
ttacatgaaggaaacacacctctta

SEQ ID NO: 477449 - DNA, 25 bp, Artificial
  probe
  misc_feature (1)..(25): SEQ ID NO: ; THR5_at; Start 576; Stop 600
gtactggaagggcttcaaggaatat

SEQ ID NO: 477450 - DNA, 25 bp, Artificial
  probe
  misc_feature (1)..(25): SEQ ID NO: ; THR5_at; Start 412; Stop 436
attgtccgttccatctgtgagaaat

SEQ ID NO: 477451 - DNA, 25 bp, Artificial
  probe
  misc_feature (1)..(25): SEQ ID NO: ; THR5_at; Start 71; Stop 95
tacatgaaggaaacacacctcttat

SEQ ID NO: 477452 - DNA, 25 bp, Artificial
  probe
  misc_feature (1)..(25): SEQ ID NO: ; THR5_at; Start 69; Stop 93
tttacatgaaggaaacacacctctt

SEQ ID NO: 477453 - DNA, 25 bp, Artificial
  probe
  misc_feature (1)..(25): SEQ ID NO: ; THR5_at; Start 66; Stop 90
aactttacatgaaggaaacacacct

SEQ ID NO: 477454 - DNA, 25 bp, Artificial
  probe
  misc_feature (1)..(25): SEQ ID NO: ; THR5_at; Start 68; Stop 92
ctttacatgaaggaaacacacctct

SEQ ID NO: 477455 - DNA, 25 bp, Artificial
  probe
  misc_feature (1)..(25): SEQ ID NO: ; THR5_at; Start 77; Stop 101
aaggaaacacacctcttattcacct

SEQ ID NO: 477456 - DNA, 25 bp, Artificial
  probe
  misc_feature (1)..(25): SEQ ID NO: ; THR5_at; Start 411; Stop 435
aattgtccgttccatctgtgagaaa

SEQ ID NO: 477457 - DNA, 25 bp, Artificial
  probe
  misc_feature (1)..(25): SEQ ID NO: ; THR5_at; Start 410; Stop 434
aaattgtccgttccatctgtgagaa

SEQ ID NO: 477458 - DNA, 25 bp, Artificial
  probe
  misc_feature (1)..(25): SEQ ID NO: ; THR5_at; Start 579; Stop 603
ctggaagggcttcaaggaatatcat

SEQ ID NO: 477459 - DNA, 25 bp, Artificial
  probe
  misc_feature (1)..(25): SEQ ID NO: ; THR5_at; Start 67; Stop 91
actttacatgaaggaaacacacctc

SEQ ID NO: 477460 - DNA, 25 bp, Artificial
  probe
  misc_feature (1)..(25): SEQ ID NO: ; THR5_at; Start 36; Stop 60
tttacctgtaacagatcaaacaccg

SEQ ID NO: 477461 - DNA, 25 bp, Artificial
  probe
  misc_feature (1)..(25): SEQ ID NO: ; THR5_at; Start 413; Stop 437
ttgtccgttccatctgtgagaaatc

SEQ ID NO: 477462 - DNA, 25 bp, Artificial
  probe
  misc_feature (1)..(25): SEQ ID NO: ; THR5_at; Start 580; Stop 604
tggaagggcttcaaggaatatcatg

SEQ ID NO: 477463 - DNA, 25 bp, Artificial
  probe
  misc_feature (1)..(25): SEQ ID NO: ; THR5_at; Start 78; Stop 102
aggaaacacacctcttattcacctg

SEQ ID NO: 477464 - DNA, 25 bp, Artificial
  probe
  misc_feature (1)..(25): SEQ ID NO: ; THR5_at; Start 354; Stop 378
tgtcatgtacggagccgagattatc

SEQ ID NO: 477465 - DNA, 25 bp, Artificial
  probe
  misc_feature (1)..(25): SEQ ID NO: ; THR5_at; Start 353; Stop 377
ctgtcatgtacggagccgagattat

SEQ ID NO: 477466 - DNA, 25 bp, Artificial
  probe
  misc_feature (1)..(25): SEQ ID NO: ; THR5_at; Start 448; Stop 472
cttgtcaactcagtcaacccttacc

SEQ ID NO: 477467 - DNA, 25 bp, Artificial
  probe
  misc_feature (1)..(25): SEQ ID NO: ; THR5_at; Start 447; Stop 471
ccttgtcaactcagtcaacccttac

SEQ ID NO: 477468 - DNA, 25 bp, Artificial
  probe
  misc_feature (1)..(25): SEQ ID NO: ; THRM_at; Start 489; Stop 513
ataacctgatctaccaagtggctaa

SEQ ID NO: 477469 - DNA, 25 bp, Artificial
  probe
  misc_feature (1)..(25): SEQ ID NO: ; THRM_at; Start 269; Stop 293
tgaagacagcatccttgaatatgta

SEQ ID NO: 477470 - DNA, 25 bp, Artificial
  probe
  misc_feature (1)..(25): SEQ ID NO: ; THRM_at; Start 268; Stop 292
atgaagacagcatccttgaatatgt

SEQ ID NO: 477471 - DNA, 25 bp, Artificial
  probe
  misc_feature (1)..(25): SEQ ID NO: ; THRM_at; Start 488; Stop 512
gataacctgatctaccaagtggcta

SEQ ID NO: 477472 - DNA, 25 bp, Artificial
  probe
  misc_feature (1)..(25): SEQ ID NO: ; THRM_at; Start 270; Stop 294
gaagacagcatccttgaatatgtaa

SEQ ID NO: 477473 - DNA, 25 bp, Artificial
  probe
  misc_feature (1)..(25): SEQ ID NO: ; THRM_at; Start 484; Stop 508
tacagataacctgatctaccaagtg

SEQ ID NO: 477474 - DNA, 25 bp, Artificial
  probe
  misc_feature (1)..(25): SEQ ID NO: ; THRM_at; Start 483; Stop 507
gtacagataacctgatctaccaagt

SEQ ID NO: 477475 - DNA, 25 bp, Artificial
  probe
  misc_feature (1)..(25): SEQ ID NO: ; THRM_at; Start 38; Stop 62
cgaagtcactgatgatgaaatcctt

SEQ ID NO: 477476 - DNA, 25 bp, Artificial
  probe
  misc_feature (1)..(25): SEQ ID NO: ; THRM_at; Start 490; Stop 514
taacctgatctaccaagtggctaaa

SEQ ID NO: 477477 - DNA, 25 bp, Artificial
  probe
  misc_feature (1)..(25): SEQ ID NO: ; THRM_at; Start 485; Stop 509
acagataacctgatctaccaagtgg

SEQ ID NO: 477478 - DNA, 25 bp, Artificial
  probe
  misc_feature (1)..(25): SEQ ID NO: ; THRM_at; Start 271; Stop 295
aagacagcatccttgaatatgtaaa

SEQ ID NO: 477479 - DNA, 25 bp, Artificial
  probe
  misc_feature (1)..(25): SEQ ID NO: ; THRM_at; Start 266; Stop 290
tgatgaagacagcatccttgaatat

SEQ ID NO: 477480 - DNA, 25 bp, Artificial
  probe
  misc_feature (1)..(25): SEQ ID NO: ; THRM_at; Start 267; Stop 291
gatgaagacagcatccttgaatatg

SEQ ID NO: 477481 - DNA, 25 bp, Artificial
  probe
  misc_feature (1)..(25): SEQ ID NO: ; THRM_at; Start 37; Stop 61
acgaagtcactgatgatgaaatcct

SEQ ID NO: 477482 - DNA, 25 bp, Artificial
  probe
  misc_feature (1)..(25): SEQ ID NO: ; THRM_at; Start 265; Stop 289
ctgatgaagacagcatccttgaata

SEQ ID NO: 477483 - DNA, 25 bp, Artificial
  probe
  misc_feature (1)..(25): SEQ ID NO: ; THRM_at; Start 192; Stop 216
ttaacaggaaacggactgaaagatc

SEQ ID NO: 477484 - DNA, 25 bp, Artificial
  probe
  misc_feature (1)..(25): SEQ ID NO: ; THRM_at; Start 36; Stop 60
gacgaagtcactgatgatgaaatcc

SEQ ID NO: 477485 - DNA, 25 bp, Artificial
  probe
  misc_feature (1)..(25): SEQ ID NO: ; THRM_at; Start 235; Stop 259
tttcagaaatcaagcctgtcacatt

SEQ ID NO: 477486 - DNA, 25 bp, Artificial
  probe
  misc_feature (1)..(25): SEQ ID NO: ; THRM_at; Start 482; Stop 506
ggtacagataacctgatctaccaag

SEQ ID NO: 477487 - DNA, 25 bp, Artificial
  probe
  misc_feature (1)..(25): SEQ ID NO: ; THRM_at; Start 406; Stop 430
atatttgaagctgaccgtctttgaa

SEQ ID NO: 477488 - DNA, 25 bp, Artificial
  probe
  misc_feature (1)..(25): SEQ ID NO: ; THRM_at; Start 407; Stop 431
tatttgaagctgaccgtctttgaaa

SEQ ID NO: 477489 - DNA, 25 bp, Artificial
  probe
  misc_feature (1)..(25): SEQ ID NO: ; THRM_at; Start 236; Stop 260
ttcagaaatcaagcctgtcacattg

SEQ ID NO: 477490 - DNA, 25 bp, Artificial
  probe
  misc_feature (1)..(25): SEQ ID NO: ; THRM_at; Start 405; Stop 429
gatatttgaagctgaccgtctttga

SEQ ID NO: 477491 - DNA, 25 bp, Artificial
  probe
  misc_feature (1)..(25): SEQ ID NO: ; THRM_at; Start 491; Stop 515
aacctgatctaccaagtggctaaac

SEQ ID NO: 477492 - DNA, 25 bp, Artificial
  probe
  misc_feature (1)..(25): SEQ ID NO: ; THRM_at; Start 404; Stop 428
agatatttgaagctgaccgtctttg

SEQ ID NO: 477493 - DNA, 25 bp, Artificial
  probe
  misc_feature (1)..(25): SEQ ID NO: ; THRM_at; Start 487; Stop 511
agataacctgatctaccaagtggct

SEQ ID NO: 477494 - DNA, 25 bp, Artificial
  probe
  misc_feature (1)..(25): SEQ ID NO: ; THRM_at; Start 486; Stop 510
cagataacctgatctaccaagtggc

SEQ ID NO: 477495 - DNA, 25 bp, Artificial
  probe
  misc_feature (1)..(25): SEQ ID NO: ; THRM_at; Start 481; Stop 505
cggtacagataacctgatctaccaa

SEQ ID NO: 477496 - DNA, 25 bp, Artificial
  probe
  misc_feature (1)..(25): SEQ ID NO: ; THRM_at; Start 234; Stop 258
atttcagaaatcaagcctgtcacat

SEQ ID NO: 477497 - DNA, 25 bp, Artificial
  probe
  misc_feature (1)..(25): SEQ ID NO: ; THRM_at; Start 264; Stop 288
actgatgaagacagcatccttgaat

SEQ ID NO: 477498 - DNA, 25 bp, Artificial
  probe
  misc_feature (1)..(25): SEQ ID NO: ; THRM_at; Start 403; Stop 427
cagatatttgaagctgaccgtcttt

SEQ ID NO: 477499 - DNA, 25 bp, Artificial
  probe
  misc_feature (1)..(25): SEQ ID NO: ; THRM_at; Start 408; Stop 432
atttgaagctgaccgtctttgaaag

SEQ ID NO: 477500 - DNA, 25 bp, Artificial
  probe
  misc_feature (1)..(25): SEQ ID NO: ; THRM_at; Start 233; Stop 257
catttcagaaatcaagcctgtcaca

SEQ ID NO: 477501 - DNA, 25 bp, Artificial
  probe
  misc_feature (1)..(25): SEQ ID NO: ; TRP3_at; Start 432; Stop 456
accatcaagataacacaactcaaga

SEQ ID NO: 477502 - DNA, 25 bp, Artificial
  probe
  misc_feature (1)..(25): SEQ ID NO: ; TRP3_at; Start 431; Stop 455
caccatcaagataacacaactcaag

SEQ ID NO: 477503 - DNA, 25 bp, Artificial
  probe
  misc_feature (1)..(25): SEQ ID NO: ; TRP3_at; Start 430; Stop 454
tcaccatcaagataacacaactcaa

SEQ ID NO: 477504 - DNA, 25 bp, Artificial
  probe
  misc_feature (1)..(25): SEQ ID NO: ; TRP3_at; Start 429; Stop 453
ttcaccatcaagataacacaactca

SEQ ID NO: 477505 - DNA, 25 bp, Artificial
  probe
  misc_feature (1)..(25): SEQ ID NO: ; TRP3_at; Start 433; Stop 457
ccatcaagataacacaactcaagaa

SEQ ID NO: 477506 - DNA, 25 bp, Artificial
  probe
  misc_feature (1)..(25): SEQ ID NO: ; TRP3_at; Start 428; Stop 452
cttcaccatcaagataacacaactc

SEQ ID NO: 477507 - DNA, 25 bp, Artificial
  probe
  misc_feature (1)..(25): SEQ ID NO: ; TRP3_at; Start 427; Stop 451
gcttcaccatcaagataacacaact

SEQ ID NO: 477508 - DNA, 25 bp, Artificial
  probe
  misc_feature (1)..(25): SEQ ID NO: ; TRP3_at; Start 31; Stop 55
gctgtacttatcggtgaatcattga

SEQ ID NO: 477509 - DNA, 25 bp, Artificial
  probe
  misc_feature (1)..(25): SEQ ID NO: ; TRP3_at; Start 33; Stop 57
tgtacttatcggtgaatcattgatg

SEQ ID NO: 477510 - DNA, 25 bp, Artificial
  probe
  misc_feature (1)..(25): SEQ ID NO: ; TRP3_at; Start 39; Stop 63
tatcggtgaatcattgatgagacaa

SEQ ID NO: 477511 - DNA, 25 bp, Artificial
  probe
  misc_feature (1)..(25): SEQ ID NO: ; TRP3_at; Start 38; Stop 62
ttatcggtgaatcattgatgagaca

SEQ ID NO: 477512 - DNA, 25 bp, Artificial
  probe
  misc_feature (1)..(25): SEQ ID NO: ; TRP3_at; Start 36; Stop 60
acttatcggtgaatcattgatgaga

SEQ ID NO: 477513 - DNA, 25 bp, Artificial
  probe
  misc_feature (1)..(25): SEQ ID NO: ; TRP3_at; Start 37; Stop 61
cttatcggtgaatcattgatgagac

SEQ ID NO: 477514 - DNA, 25 bp, Artificial
  probe
  misc_feature (1)..(25): SEQ ID NO: ; TRP3_at; Start 32; Stop 56
ctgtacttatcggtgaatcattgat

SEQ ID NO: 477515 - DNA, 25 bp, Artificial
  probe
  misc_feature (1)..(25): SEQ ID NO: ; TRP3_at; Start 297; Stop 321
atgaatcaatagagacgatgtcacg

SEQ ID NO: 477516 - DNA, 25 bp, Artificial
  probe
  misc_feature (1)..(25): SEQ ID NO: ; TRP3_at; Start 296; Stop 320
aatgaatcaatagagacgatgtcac

SEQ ID NO: 477517 - DNA, 25 bp, Artificial
  probe
  misc_feature (1)..(25): SEQ ID NO: ; TRP3_at; Start 34; Stop 58
gtacttatcggtgaatcattgatga

SEQ ID NO: 477518 - DNA, 25 bp, Artificial
  probe
  misc_feature (1)..(25): SEQ ID NO: ; TRP3_at; Start 35; Stop 59
tacttatcggtgaatcattgatgag

SEQ ID NO: 477519 - DNA, 25 bp, Artificial
  probe
  misc_feature (1)..(25): SEQ ID NO: ; TRP3_at; Start 29; Stop 53
gagctgtacttatcggtgaatcatt

SEQ ID NO: 477520 - DNA, 25 bp, Artificial
  probe
  misc_feature (1)..(25): SEQ ID NO: ; TRP3_at; Start 30; Stop 54
agctgtacttatcggtgaatcattg

SEQ ID NO: 477521 - DNA, 25 bp, Artificial
  probe
  misc_feature (1)..(25): SEQ ID NO: ; TRP3_at; Start 440; Stop 464
gataacacaactcaagaaatagccc

SEQ ID NO: 477522 - DNA, 25 bp, Artificial
  probe
  misc_feature (1)..(25): SEQ ID NO: ; TRP3_at; Start 426; Stop 450
cgcttcaccatcaagataacacaac

SEQ ID NO: 477523 - DNA, 25 bp, Artificial
  probe
  misc_feature (1)..(25): SEQ ID NO: ; TRP3_at; Start 439; Stop 463
agataacacaactcaagaaatagcc

SEQ ID NO: 477524 - DNA, 25 bp, Artificial
  probe
  misc_feature (1)..(25): SEQ ID NO: ; TRP3_at; Start 130; Stop 154
atattgcggtattcggtcactaaag

SEQ ID NO: 477525 - DNA, 25 bp, Artificial
  probe
  misc_feature (1)..(25): SEQ ID NO: ; TRP3_at; Start 293; Stop 317
gttaatgaatcaatagagacgatgt

SEQ ID NO: 477526 - DNA, 25 bp, Artificial
  probe
  misc_feature (1)..(25): SEQ ID NO: ; TRP3_at; Start 292; Stop 316
tgttaatgaatcaatagagacgatg

SEQ ID NO: 477527 - DNA, 25 bp, Artificial
  probe
  misc_feature (1)..(25): SEQ ID NO: ; TRP3_at; Start 473; Stop 497
gataatgttgacggctttgtgattg

SEQ ID NO: 477528 - DNA, 25 bp, Artificial
  probe
  misc_feature (1)..(25): SEQ ID NO: ; TRP3_at; Start 472; Stop 496
agataatgttgacggctttgtgatt

SEQ ID NO: 477529 - DNA, 25 bp, Artificial
  probe
  misc_feature (1)..(25): SEQ ID NO: ; TRP3_at; Start 441; Stop 465
ataacacaactcaagaaatagcccg

SEQ ID NO: 477530 - DNA, 25 bp, Artificial
  probe
  misc_feature (1)..(25): SEQ ID NO: ; TRP3_at; Start 295; Stop 319
taatgaatcaatagagacgatgtca

SEQ ID NO: 477531 - DNA, 25 bp, Artificial
  probe
  misc_feature (1)..(25): SEQ ID NO: ; TRP3_at; Start 485; Stop 509
ggctttgtgattgattcatctgtaa

SEQ ID NO: 477532 - DNA, 25 bp, Artificial
  probe
  misc_feature (1)..(25): SEQ ID NO: ; TRP3_at; Start 475; Stop 499
taatgttgacggctttgtgattgat

SEQ ID NO: 477533 - DNA, 25 bp, Artificial
  probe
  misc_feature (1)..(25): SEQ ID NO: ; TRP3_at; Start 474; Stop 498
ataatgttgacggctttgtgattga

SEQ ID NO: 477534 - DNA, 25 bp, Artificial
  probe
  misc_feature (1)..(25): SEQ ID NO: ; TRP5_at; Start 444; Stop 468
cgatggacttcctgatattgttgat

SEQ ID NO: 477535 - DNA, 25 bp, Artificial
  probe
  misc_feature (1)..(25): SEQ ID NO: ; TRP5_at; Start 357; Stop 381
gatattgtcaattcttgctcatcgg

SEQ ID NO: 477536 - DNA, 25 bp, Artificial
  probe
  misc_feature (1)..(25): SEQ ID NO: ; TRP5_at; Start 356; Stop 380
ggatattgtcaattcttgctcatcg

SEQ ID NO: 477537 - DNA, 25 bp, Artificial
  probe
  misc_feature (1)..(25): SEQ ID NO: ; TRP5_at; Start 446; Stop 470
atggacttcctgatattgttgatac

SEQ ID NO: 477538 - DNA, 25 bp, Artificial
  probe
  misc_feature (1)..(25): SEQ ID NO: ; TRP5_at; Start 447; Stop 471
tggacttcctgatattgttgataca

SEQ ID NO: 477539 - DNA, 25 bp, Artificial
  probe
  misc_feature (1)..(25): SEQ ID NO: ; TRP5_at; Start 445; Stop 469
gatggacttcctgatattgttgata

SEQ ID NO: 477540 - DNA, 25 bp, Artificial
  probe
  misc_feature (1)..(25): SEQ ID NO: ; TRP5_at; Start 451; Stop 475
cttcctgatattgttgatacatgcg

SEQ ID NO: 477541 - DNA, 25 bp, Artificial
  probe
  misc_feature (1)..(25): SEQ ID NO: ; TRP5_at; Start 455; Stop 479
ctgatattgttgatacatgcggaac

SEQ ID NO: 477542 - DNA, 25 bp, Artificial
  probe
  misc_feature (1)..(25): SEQ ID NO: ; TRP5_at; Start 448; Stop 472
ggacttcctgatattgttgatacat

SEQ ID NO: 477543 - DNA, 25 bp, Artificial
  probe
  misc_feature (1)..(25): SEQ ID NO: ; TRP5_at; Start 450; Stop 474
acttcctgatattgttgatacatgc

SEQ ID NO: 477544 - DNA, 25 bp, Artificial
  probe
  misc_feature (1)..(25): SEQ ID NO: ; TRP5_at; Start 61; Stop 85
cttgtattacgattcgcacgatgag

SEQ ID NO: 477545 - DNA, 25 bp, Artificial
  probe
  misc_feature (1)..(25): SEQ ID NO: ; TRP5_at; Start 59; Stop 83
ctcttgtattacgattcgcacgatg

SEQ ID NO: 477546 - DNA, 25 bp, Artificial
  probe
  misc_feature (1)..(25): SEQ ID NO: ; TRP5_at; Start 454; Stop 478
cctgatattgttgatacatgcggaa

SEQ ID NO: 477547 - DNA, 25 bp, Artificial
  probe
  misc_feature (1)..(25): SEQ ID NO: ; TRP5_at; Start 452; Stop 476
ttcctgatattgttgatacatgcgg

SEQ ID NO: 477548 - DNA, 25 bp, Artificial
  probe
  misc_feature (1)..(25): SEQ ID NO: ; TRP5_at; Start 300; Stop 324
tgaaacgctgatgaatatgatgatg

SEQ ID NO: 477549 - DNA, 25 bp, Artificial
  probe
  misc_feature (1)..(25): SEQ ID NO: ; TRP5_at; Start 301; Stop 325
gaaacgctgatgaatatgatgatgg

SEQ ID NO: 477550 - DNA, 25 bp, Artificial
  probe
  misc_feature (1)..(25): SEQ ID NO: ; TRP5_at; Start 299; Stop 323
ctgaaacgctgatgaatatgatgat

SEQ ID NO: 477551 - DNA, 25 bp, Artificial
  probe
  misc_feature (1)..(25): SEQ ID NO: ; TRP5_at; Start 194; Stop 218
aacgattcatattgcagaagacatg

SEQ ID NO: 477552 - DNA, 25 bp, Artificial
  probe
  misc_feature (1)..(25): SEQ ID NO: ; TRP5_at; Start 60; Stop 84
tcttgtattacgattcgcacgatga

SEQ ID NO: 477553 - DNA, 25 bp, Artificial
  probe
  misc_feature (1)..(25): SEQ ID NO: ; TRP5_at; Start 58; Stop 82
actcttgtattacgattcgcacgat

SEQ ID NO: 477554 - DNA, 25 bp, Artificial
  probe
  misc_feature (1)..(25): SEQ ID NO: ; TRP5_at; Start 443; Stop 467
tcgatggacttcctgatattgttga

SEQ ID NO: 477555 - DNA, 25 bp, Artificial
  probe
  misc_feature (1)..(25): SEQ ID NO: ; TRP5_at; Start 303; Stop 327
aacgctgatgaatatgatgatggca

SEQ ID NO: 477556 - DNA, 25 bp, Artificial
  probe
  misc_feature (1)..(25): SEQ ID NO: ; TRP5_at; Start 217; Stop 241
tgtttcatagcaaggaggataaagc

SEQ ID NO: 477557 - DNA, 25 bp, Artificial
  probe
  misc_feature (1)..(25): SEQ ID NO: ; TRP5_at; Start 62; Stop 86
ttgtattacgattcgcacgatgagt

SEQ ID NO: 477558 - DNA, 25 bp, Artificial
  probe
  misc_feature (1)..(25): SEQ ID NO: ; TRP5_at; Start 216; Stop 240
atgtttcatagcaaggaggataaag

SEQ ID NO: 477559 - DNA, 25 bp, Artificial
  probe
  misc_feature (1)..(25): SEQ ID NO: ; TRP5_at; Start 65; Stop 89
tattacgattcgcacgatgagtgta

SEQ ID NO: 477560 - DNA, 25 bp, Artificial
  probe
  misc_feature (1)..(25): SEQ ID NO: ; TRP5_at; Start 32; Stop 56
ctacattgggtttgacgggaatatc

SEQ ID NO: 477561 - DNA, 25 bp, Artificial
  probe
  misc_feature (1)..(25): SEQ ID NO: ; TRP5_at; Start 355; Stop 379
gggatattgtcaattcttgctcatc

SEQ ID NO: 477562 - DNA, 25 bp, Artificial
  probe
  misc_feature (1)..(25): SEQ ID NO: ; TRP5_at; Start 309; Stop 333
gatgaatatgatgatggcagcggaa

SEQ ID NO: 477563 - DNA, 25 bp, Artificial
  probe
  misc_feature (1)..(25): SEQ ID NO: ; TRP5_at; Start 57; Stop 81
gactcttgtattacgattcgcacga

SEQ ID NO: 477564 - DNA, 25 bp, Artificial
  probe
  misc_feature (1)..(25): SEQ ID NO: ; TRP5_at; Start 298; Stop 322
gctgaaacgctgatgaatatgatga

SEQ ID NO: 477565 - DNA, 25 bp, Artificial
  probe
  misc_feature (1)..(25): SEQ ID NO: ; TRP5_at; Start 453; Stop 477
tcctgatattgttgatacatgcgga

SEQ ID NO: 477566 - DNA, 25 bp, Artificial
  probe
  misc_feature (1)..(25): SEQ ID NO: ; TRP5_at; Start 442; Stop 466
gtcgatggacttcctgatattgttg

SEQ ID NO: 477567 - DNA, 25 bp, Artificial
  probe
  misc_feature (1)..(25): SEQ ID NO: ; TRPM_at; Start 276; Stop 300
gactaaagcagaaagaggaagagat

SEQ ID NO: 477568 - DNA, 25 bp, Artificial
  probe
  misc_feature (1)..(25): SEQ ID NO: ; TRPM_at; Start 21; Stop 45
aatataccgtttcacccgaagattt

SEQ ID NO: 477569 - DNA, 25 bp, Artificial
  probe
  misc_feature (1)..(25): SEQ ID NO: ; TRPM_at; Start 56; Stop 80
aatggcagacttgaagatttacagg

SEQ ID NO: 477570 - DNA, 25 bp, Artificial
  probe
  misc_feature (1)..(25): SEQ ID NO: ; TRPM_at; Start 22; Stop 46
atataccgtttcacccgaagatttc

SEQ ID NO: 477571 - DNA, 25 bp, Artificial
  probe
  misc_feature (1)..(25): SEQ ID NO: ; TRPM_at; Start 20; Stop 44
gaatataccgtttcacccgaagatt

SEQ ID NO: 477572 - DNA, 25 bp, Artificial
  probe
  misc_feature (1)..(25): SEQ ID NO: ; TRPM_at; Start 277; Stop 301
actaaagcagaaagaggaagagatc

SEQ ID NO: 477573 - DNA, 25 bp, Artificial
  probe
  misc_feature (1)..(25): SEQ ID NO: ; TRPM_at; Start 272; Stop 296
gaacgactaaagcagaaagaggaag

SEQ ID NO: 477574 - DNA, 25 bp, Artificial
  probe
  misc_feature (1)..(25): SEQ ID NO: ; TRPM_at; Start 54; Stop 78
caaatggcagacttgaagatttaca

SEQ ID NO: 477575 - DNA, 25 bp, Artificial
  probe
  misc_feature (1)..(25): SEQ ID NO: ; TRPM_at; Start 53; Stop 77
acaaatggcagacttgaagatttac

SEQ ID NO: 477576 - DNA, 25 bp, Artificial
  probe
  misc_feature (1)..(25): SEQ ID NO: ; TRPM_at; Start 52; Stop 76
cacaaatggcagacttgaagattta

SEQ ID NO: 477577 - DNA, 25 bp, Artificial
  probe
  misc_feature (1)..(25): SEQ ID NO: ; TRPM_at; Start 55; Stop 79
aaatggcagacttgaagatttacag

SEQ ID NO: 477578 - DNA, 25 bp, Artificial
  probe
  misc_feature (1)..(25): SEQ ID NO: ; TRPM_at; Start 273; Stop 297
aacgactaaagcagaaagaggaaga

SEQ ID NO: 477579 - DNA, 25 bp, Artificial
  probe
  misc_feature (1)..(25): SEQ ID NO: ; TRPM_at; Start 275; Stop 299
cgactaaagcagaaagaggaagaga

SEQ ID NO: 477580 - DNA, 25 bp, Artificial
  probe
  misc_feature (1)..(25): SEQ ID NO: ; TRPM_at; Start 271; Stop 295
tgaacgactaaagcagaaagaggaa

SEQ ID NO: 477581 - DNA, 25 bp, Artificial
  probe
  misc_feature (1)..(25): SEQ ID NO: ; TRPM_at; Start 270; Stop 294
ttgaacgactaaagcagaaagagga

SEQ ID NO: 477582 - DNA, 25 bp, Artificial
  probe
  misc_feature (1)..(25): SEQ ID NO: ; TRPM_at; Start 269; Stop 293
cttgaacgactaaagcagaaagagg

SEQ ID NO: 477583 - DNA, 25 bp, Artificial
  probe
  misc_feature (1)..(25): SEQ ID NO: ; TRPM_at; Start 57; Stop 81
atggcagacttgaagatttacaggt

SEQ ID NO: 477584 - DNA, 25 bp, Artificial
  probe
  misc_feature (1)..(25): SEQ ID NO: ; TRPM_at; Start 274; Stop 298
acgactaaagcagaaagaggaagag

SEQ ID NO: 477585 - DNA, 25 bp, Artificial
  probe
  misc_feature (1)..(25): SEQ ID NO: ; TRPM_at; Start 51; Stop 75
tcacaaatggcagacttgaagattt

SEQ ID NO: 477586 - DNA, 25 bp, Artificial
  probe
  misc_feature (1)..(25): SEQ ID NO: ; TRPM_at; Start 19; Stop 43
ggaatataccgtttcacccgaagat

SEQ ID NO: 477587 - DNA, 25 bp, Artificial
  probe
  misc_feature (1)..(25): SEQ ID NO: ; TRPM_at; Start 58; Stop 82
tggcagacttgaagatttacaggtg

SEQ ID NO: 477588 - DNA, 25 bp, Artificial
  probe
  misc_feature (1)..(25): SEQ ID NO: ; TRPM_at; Start 61; Stop 85
cagacttgaagatttacaggtgcag

SEQ ID NO: 477589 - DNA, 25 bp, Artificial
  probe
  misc_feature (1)..(25): SEQ ID NO: ; TRPM_at; Start 39; Stop 63
aagatttcggtttcacaaatggcag

SEQ ID NO: 477590 - DNA, 25 bp, Artificial
  probe
  misc_feature (1)..(25): SEQ ID NO: ; TRPM_at; Start 38; Stop 62
gaagatttcggtttcacaaatggca

SEQ ID NO: 477591 - DNA, 25 bp, Artificial
  probe
  misc_feature (1)..(25): SEQ ID NO: ; TRPM_at; Start 564; Stop 588
ggggaaaacagttatttatcagacg

SEQ ID NO: 477592 - DNA, 25 bp, Artificial
  probe
  misc_feature (1)..(25): SEQ ID NO: ; TRPM_at; Start 149; Stop 173
ttatctattacggcttttaatgcgg

SEQ ID NO: 477593 - DNA, 25 bp, Artificial
  probe
  misc_feature (1)..(25): SEQ ID NO: ; TRPM_at; Start 462; Stop 486
gggcttattaaagaggattttgtgc

SEQ ID NO: 477594 - DNA, 25 bp, Artificial
  probe
  misc_feature (1)..(25): SEQ ID NO: ; TRPM_at; Start 461; Stop 485
agggcttattaaagaggattttgtg

SEQ ID NO: 477595 - DNA, 25 bp, Artificial
  probe
  misc_feature (1)..(25): SEQ ID NO: ; TRPM_at; Start 97; Stop 121
gagcgcctatctcattcagaatatt

SEQ ID NO: 477596 - DNA, 25 bp, Artificial
  probe
  misc_feature (1)..(25): SEQ ID NO: ; TRPM_at; Start 563; Stop 587
aggggaaaacagttatttatcagac

SEQ ID NO: 477597 - DNA, 25 bp, Artificial
  probe
  misc_feature (1)..(25): SEQ ID NO: ; TRPM_at; Start 455; Stop 479
gtcaaaagggcttattaaagaggat

SEQ ID NO: 477598 - DNA, 25 bp, Artificial
  probe
  misc_feature (1)..(25): SEQ ID NO: ; TRPM_at; Start 454; Stop 478
cgtcaaaagggcttattaaagagga

SEQ ID NO: 477599 - DNA, 25 bp, Artificial
  probe
  misc_feature (1)..(25): SEQ ID NO: ; TRPM_at; Start 150; Stop 174
tatctattacggcttttaatgcggg

SEQ ID NO: 477600 - DNA, 25 bp, Artificial
  probe
  misc_feature (1)..(25): SEQ ID NO: 7782; WAN024B9J; Start 49; Stop 73
cactgttttgaggttgcagatggac

SEQ ID NO: 477601 - DNA, 25 bp, Artificial
  probe
  misc_feature (1)..(25): SEQ ID NO: 7789; WAN024B25; Start 63; Stop 87
agagaaagaagaaagacagaaatta

SEQ ID NO: 477602 - DNA, 25 bp, Artificial
  probe
  misc_feature (1)..(25): SEQ ID NO: 7789; WAN024B25; Start 70; Stop 94
gaagaaagacagaaattattcaaga

SEQ ID NO: 477603 - DNA, 25 bp, Artificial
  probe
  misc_feature (1)..(25): SEQ ID NO: 7789; WAN024B25; Start 69; Stop 93
agaagaaagacagaaattattcaag

SEQ ID NO: 477604 - DNA, 25 bp, Artificial
  probe
  misc_feature (1)..(25): SEQ ID NO: 7789; WAN024B25; Start 64; Stop 88
gagaaagaagaaagacagaaattat

SEQ ID NO: 477605 - DNA, 25 bp, Artificial
  probe
  misc_feature (1)..(25): SEQ ID NO: 7789; WAN024B25; Start 71; Stop 95
aagaaagacagaaattattcaagaa

SEQ ID NO: 477606 - DNA, 25 bp, Artificial
  probe
  misc_feature (1)..(25): SEQ ID NO: 7789; WAN024B25; Start 68; Stop 92
aagaagaaagacagaaattattcaa

SEQ ID NO: 477607 - DNA, 25 bp, Artificial
  probe
  misc_feature (1)..(25): SEQ ID NO: 7789; WAN024B25; Start 67; Stop 91
aaagaagaaagacagaaattattca

SEQ ID NO: 477608 - DNA, 25 bp, Artificial
  probe
  misc_feature (1)..(25): SEQ ID NO: 7794; WAN0249YT; Start 54; Stop 78
aaatttgtcaacttttaaccgctat

SEQ ID NO: 477609 - DNA, 25 bp, Artificial
  probe
  misc_feature (1)..(25): SEQ ID NO: 7794; WAN0249YT; Start 53; Stop 77
taaatttgtcaacttttaaccgcta

SEQ ID NO: 477610 - DNA, 25 bp, Artificial
  probe
  misc_feature (1)..(25): SEQ ID NO: 7794; WAN0249YT; Start 52; Stop 76
ttaaatttgtcaacttttaaccgct

SEQ ID NO: 477611 - DNA, 25 bp, Artificial
  probe
  misc_feature (1)..(25): SEQ ID NO: 7794; WAN0249YT; Start 22; Stop 46
aaatttacttacttagtgtagtcct

SEQ ID NO: 477612 - DNA, 25 bp, Artificial
  probe
  misc_feature (1)..(25): SEQ ID NO: 7794; WAN0249YT; Start 51; Stop 75
tttaaatttgtcaacttttaaccgc

SEQ ID NO: 477613 - DNA, 25 bp, Artificial
  probe
  misc_feature (1)..(25): SEQ ID NO: 7794; WAN0249YT; Start 28; Stop 52
acttacttagtgtagtcctaaaatt

SEQ ID NO: 477614 - DNA, 25 bp, Artificial
  probe
  misc_feature (1)..(25): SEQ ID NO: 7794; WAN0249YT; Start 50; Stop 74
atttaaatttgtcaacttttaaccg

SEQ ID NO: 477615 - DNA, 25 bp, Artificial
  probe
  misc_feature (1)..(25): SEQ ID NO: 7795; WAN024A8L; Start 52; Stop 76
aaaataaaaccaggaaaacaatttc

SEQ ID NO: 477616 - DNA, 25 bp, Artificial
  probe
  misc_feature (1)..(25): SEQ ID NO: 7796; WAN0249WG; Start 16; Stop 40
ggaaacctcggaaaatttaaaggag

SEQ ID NO: 477617 - DNA, 25 bp, Artificial
  probe
  misc_feature (1)..(25): SEQ ID NO: 7796; WAN0249WG; Start 17; Stop 41
gaaacctcggaaaatttaaaggaga

SEQ ID NO: 477618 - DNA, 25 bp, Artificial
  probe
  misc_feature (1)..(25): SEQ ID NO: 7796; WAN0249WG; Start 20; Stop 44
acctcggaaaatttaaaggagaatc

SEQ ID NO: 477619 - DNA, 25 bp, Artificial
  probe
  misc_feature (1)..(25): SEQ ID NO: 7796; WAN0249WG; Start 21; Stop 45
cctcggaaaatttaaaggagaatcc

SEQ ID NO: 477620 - DNA, 25 bp, Artificial
  probe
  misc_feature (1)..(25): SEQ ID NO: 7796; WAN0249WG; Start 18; Stop 42
aaacctcggaaaatttaaaggagaa

SEQ ID NO: 477621 - DNA, 25 bp, Artificial
  probe
  misc_feature (1)..(25): SEQ ID NO: 7796; WAN0249WG; Start 22; Stop 46
ctcggaaaatttaaaggagaatcca

SEQ ID NO: 477622 - DNA, 25 bp, Artificial
  probe
  misc_feature (1)..(25): SEQ ID NO: 7796; WAN0249WG; Start 19; Stop 43
aacctcggaaaatttaaaggagaat

SEQ ID NO: 477623 - DNA, 25 bp, Artificial
  probe
  misc_feature (1)..(25): SEQ ID NO: 7796; WAN0249WG; Start 15; Stop 39
gggaaacctcggaaaatttaaagga

SEQ ID NO: 477624 - DNA, 25 bp, Artificial
  probe
  misc_feature (1)..(25): SEQ ID NO: 7796; WAN0249WG; Start 13; Stop 37
aggggaaacctcggaaaatttaaag

SEQ ID NO: 477625 - DNA, 25 bp, Artificial
  probe
  misc_feature (1)..(25): SEQ ID NO: 7796; WAN0249WG; Start 23; Stop 47
tcggaaaatttaaaggagaatccat

SEQ ID NO: 477626 - DNA, 25 bp, Artificial
  probe
  misc_feature (1)..(25): SEQ ID NO: 7796; WAN0249WG; Start 24; Stop 48
cggaaaatttaaaggagaatccatc

SEQ ID NO: 477627 - DNA, 25 bp, Artificial
  probe
  misc_feature (1)..(25): SEQ ID NO: 7796; WAN0249WG; Start 14; Stop 38
ggggaaacctcggaaaatttaaagg

SEQ ID NO: 477628 - DNA, 25 bp, Artificial
  probe
  misc_feature (1)..(25): SEQ ID NO: 7796; WAN0249WG; Start 25; Stop 49
ggaaaatttaaaggagaatccatct

SEQ ID NO: 477629 - DNA, 25 bp, Artificial
  probe
  misc_feature (1)..(25): SEQ ID NO: 7796; WAN0249WG; Start 12; Stop 36
gaggggaaacctcggaaaatttaaa

SEQ ID NO: 477630 - DNA, 25 bp, Artificial
  probe
  misc_feature (1)..(25): SEQ ID NO: 7796; WAN0249WG; Start 26; Stop 50
gaaaatttaaaggagaatccatcta

SEQ ID NO: 477631 - DNA, 25 bp, Artificial
  probe
  misc_feature (1)..(25): SEQ ID NO: 7797; WAN0249GJ; Start 2; Stop 26
gggaatcctctttaaacttaatagt

SEQ ID NO: 477632 - DNA, 25 bp, Artificial
  probe
  misc_feature (1)..(25): SEQ ID NO: 7797; WAN0249GJ; Start 1; Stop 25
agggaatcctctttaaacttaatag

SEQ ID NO: 477633 - DNA, 25 bp, Artificial
  probe
  misc_feature (1)..(25): SEQ ID NO: 7797; WAN0249GJ; Start 3; Stop 27
ggaatcctctttaaacttaatagtc

SEQ ID NO: 477634 - DNA, 25 bp, Artificial
  probe
  misc_feature (1)..(25): SEQ ID NO: 7798; WAN024AJF; Start 4; Stop 28
agactccttgtaaacaaaattcccc

SEQ ID NO: 477635 - DNA, 25 bp, Artificial
  probe
  misc_feature (1)..(25): SEQ ID NO: 7798; WAN024AJF; Start 3; Stop 27
tagactccttgtaaacaaaattccc

SEQ ID NO: 477636 - DNA, 25 bp, Artificial
  probe
  misc_feature (1)..(25): SEQ ID NO: 7798; WAN024AJF; Start 2; Stop 26
gtagactccttgtaaacaaaattcc

SEQ ID NO: 477637 - DNA, 25 bp, Artificial
  probe
  misc_feature (1)..(25): SEQ ID NO: 7798; WAN024AJF; Start 1; Stop 25
agtagactccttgtaaacaaaattc

SEQ ID NO: 477638 - DNA, 25 bp, Artificial
  probe
  misc_feature (1)..(25): SEQ ID NO: 7800; WAN0249WC; Start 26; Stop 50
cgttacgggataagagggagaaaga

SEQ ID NO: 477639 - DNA, 25 bp, Artificial
  probe
  misc_feature (1)..(25): SEQ ID NO: 7800; WAN0249WC; Start 25; Stop 49
acgttacgggataagagggagaaag

SEQ ID NO: 477640 - DNA, 25 bp, Artificial
  probe
  misc_feature (1)..(25): SEQ ID NO: 7800; WAN0249WC; Start 24; Stop 48
cacgttacgggataagagggagaaa

SEQ ID NO: 477641 - DNA, 25 bp, Artificial
  probe
  misc_feature (1)..(25): SEQ ID NO: 7801; WAN0249YS; Start 1; Stop 25
atagcggttaaaagttgacaaattt

SEQ ID NO: 477642 - DNA, 25 bp, Artificial
  probe
  misc_feature (1)..(25): SEQ ID NO: 7801; WAN0249YS; Start 2; Stop 26
tagcggttaaaagttgacaaattta

SEQ ID NO: 477643 - DNA, 25 bp, Artificial
  probe
  misc_feature (1)..(25): SEQ ID NO: 7801; WAN0249YS; Start 3; Stop 27
agcggttaaaagttgacaaatttaa

SEQ ID NO: 477644 - DNA, 25 bp, Artificial
  probe
  misc_feature (1)..(25): SEQ ID NO: 7801; WAN0249YS; Start 33; Stop 57
aggactacactaagtaagtaaattt

SEQ ID NO: 477645 - DNA, 25 bp, Artificial
  probe
  misc_feature (1)..(25): SEQ ID NO: 7801; WAN0249YS; Start 4; Stop 28
gcggttaaaagttgacaaatttaaa

SEQ ID NO: 477646 - DNA, 25 bp, Artificial
  probe
  misc_feature (1)..(25): SEQ ID NO: 7801; WAN0249YS; Start 27; Stop 51
aattttaggactacactaagtaagt

SEQ ID NO: 477647 - DNA, 25 bp, Artificial
  probe
  misc_feature (1)..(25): SEQ ID NO: 7801; WAN0249YS; Start 5; Stop 29
cggttaaaagttgacaaatttaaat

SEQ ID NO: 477648 - DNA, 25 bp, Artificial
  probe
  misc_feature (1)..(25): SEQ ID NO: 7803; WAN0249GI; Start 52; Stop 76
actattaagtttaaagaggattccc

SEQ ID NO: 477649 - DNA, 25 bp, Artificial
  probe
  misc_feature (1)..(25): SEQ ID NO: 7803; WAN0249GI; Start 53; Stop 77
ctattaagtttaaagaggattccct

SEQ ID NO: 477650 - DNA, 25 bp, Artificial
  probe
  misc_feature (1)..(25): SEQ ID NO: 7803; WAN0249GI; Start 51; Stop 75
gactattaagtttaaagaggattcc

SEQ ID NO: 477651 - DNA, 25 bp, Artificial
  probe
  misc_feature (1)..(25): SEQ ID NO: 7805; WAN024DE6; Start 1007; Stop 1031
aaaatgagttcgcagactttgtagt

SEQ ID NO: 477652 - DNA, 25 bp, Artificial
  probe
  misc_feature (1)..(25): SEQ ID NO: 7805; WAN024DE6; Start 1008; Stop 1032
aaatgagttcgcagactttgtagtc

SEQ ID NO: 477653 - DNA, 25 bp, Artificial
  probe
  misc_feature (1)..(25): SEQ ID NO: 7805; WAN024DE6; Start 1009; Stop 1033
aatgagttcgcagactttgtagtcc

SEQ ID NO: 477654 - DNA, 25 bp, Artificial
  probe
  misc_feature (1)..(25): SEQ ID NO: 7805; WAN024DE6; Start 1010; Stop 1034
atgagttcgcagactttgtagtcca

SEQ ID NO: 477655 - DNA, 25 bp, Artificial
  probe
  misc_feature (1)..(25): SEQ ID NO: 7805; WAN024DE6; Start 1011; Stop 1035
tgagttcgcagactttgtagtccag

SEQ ID NO: 477656 - DNA, 25 bp, Artificial
  probe
  misc_feature (1)..(25): SEQ ID NO: 7805; WAN024DE6; Start 1012; Stop 1036
gagttcgcagactttgtagtccagg

SEQ ID NO: 477657 - DNA, 25 bp, Artificial
  probe
  misc_feature (1)..(25): SEQ ID NO: 7806; WAN024DOX; Start 26; Stop 50
gtttgttttcaaaactttcgatatt

SEQ ID NO: 477658 - DNA, 25 bp, Artificial
  probe
  misc_feature (1)..(25): SEQ ID NO: 7806; WAN024DOX; Start 16; Stop 40
aaatatcgaagtttgttttcaaaac

SEQ ID NO: 477659 - DNA, 25 bp, Artificial
  probe
  misc_feature (1)..(25): SEQ ID NO: 7806; WAN024DOX; Start 28; Stop 52
ttgttttcaaaactttcgatatttt

SEQ ID NO: 477660 - DNA, 25 bp, Artificial
  probe
  misc_feature (1)..(25): SEQ ID NO: 7806; WAN024DOX; Start 27; Stop 51
tttgttttcaaaactttcgatattt

SEQ ID NO: 477661 - DNA, 25 bp, Artificial
  probe
  misc_feature (1)..(25): SEQ ID NO: 7806; WAN024DOX; Start 15; Stop 39
aaaatatcgaagtttgttttcaaaa

SEQ ID NO: 477662 - DNA, 25 bp, Artificial
  probe
  misc_feature (1)..(25): SEQ ID NO: 7806; WAN024DOX; Start 25; Stop 49
agtttgttttcaaaactttcgatat

SEQ ID NO: 477663 - DNA, 25 bp, Artificial
  probe
  misc_feature (1)..(25): SEQ ID NO: 7806; WAN024DOX; Start 17; Stop 41
aatatcgaagtttgttttcaaaact

SEQ ID NO: 477664 - DNA, 25 bp, Artificial
  probe
  misc_feature (1)..(25): SEQ ID NO: 7808; WAN024AXA; Start 84; Stop 108
aaaggagttactcaaactaactaat

SEQ ID NO: 477665 - DNA, 25 bp, Artificial
  probe
  misc_feature (1)..(25): SEQ ID NO: 7808; WAN024AXA; Start 83; Stop 107
aaaaggagttactcaaactaactaa

SEQ ID NO: 477666 - DNA, 25 bp, Artificial
  probe
  misc_feature (1)..(25): SEQ ID NO: 7809; WAN024ATM; Start 2128; Stop 2152
cttgctaagtggctcaatatagaac

SEQ ID NO: 477667 - DNA, 25 bp, Artificial
  probe
  misc_feature (1)..(25): SEQ ID NO: 7809; WAN024ATM; Start 2127; Stop 2151
ccttgctaagtggctcaatatagaa

SEQ ID NO: 477668 - DNA, 25 bp, Artificial
  probe
  misc_feature (1)..(25): SEQ ID NO: 7809; WAN024ATM; Start 1351; Stop 1375
ggtcaaggaatttcagtaacacaaa

SEQ ID NO: 477669 - DNA, 25 bp, Artificial
  probe
  misc_feature (1)..(25): SEQ ID NO: 7809; WAN024ATM; Start 1348; Stop 1372
tttggtcaaggaatttcagtaacac

SEQ ID NO: 477670 - DNA, 25 bp, Artificial
  probe
  misc_feature (1)..(25): SEQ ID NO: 7809; WAN024ATM; Start 1356; Stop 1380
aggaatttcagtaacacaaacacaa

SEQ ID NO: 477671 - DNA, 25 bp, Artificial
  probe
  misc_feature (1)..(25): SEQ ID NO: 7809; WAN024ATM; Start 1355; Stop 1379
aaggaatttcagtaacacaaacaca

SEQ ID NO: 477672 - DNA, 25 bp, Artificial
  probe
  misc_feature (1)..(25): SEQ ID NO: 7809; WAN024ATM; Start 1354; Stop 1378
caaggaatttcagtaacacaaacac

SEQ ID NO: 477673 - DNA, 25 bp, Artificial
  probe
  misc_feature (1)..(25): SEQ ID NO: 7809; WAN024ATM; Start 1353; Stop 1377
tcaaggaatttcagtaacacaaaca

SEQ ID NO: 477674 - DNA, 25 bp, Artificial
  probe
  misc_feature (1)..(25): SEQ ID NO: 7809; WAN024ATM; Start 1350; Stop 1374
tggtcaaggaatttcagtaacacaa

SEQ ID NO: 477675 - DNA, 25 bp, Artificial
  probe
  misc_feature (1)..(25): SEQ ID NO: 7809; WAN024ATM; Start 1349; Stop 1373
ttggtcaaggaatttcagtaacaca

SEQ ID NO: 477676 - DNA, 25 bp, Artificial
  probe
  misc_feature (1)..(25): SEQ ID NO: 7809; WAN024ATM; Start 1344; Stop 1368
ctcatttggtcaaggaatttcagta

SEQ ID NO: 477677 - DNA, 25 bp, Artificial
  probe
  misc_feature (1)..(25): SEQ ID NO: 7809; WAN024ATM; Start 1347; Stop 1371
atttggtcaaggaatttcagtaaca

SEQ ID NO: 477678 - DNA, 25 bp, Artificial
  probe
  misc_feature (1)..(25): SEQ ID NO: 7809; WAN024ATM; Start 1352; Stop 1376
gtcaaggaatttcagtaacacaaac

SEQ ID NO: 477679 - DNA, 25 bp, Artificial
  probe
  misc_feature (1)..(25): SEQ ID NO: 7809; WAN024ATM; Start 2050; Stop 2074
cagcaagtccttatcttatctgata

SEQ ID NO: 477680 - DNA, 25 bp, Artificial
  probe
  misc_feature (1)..(25): SEQ ID NO: 7809; WAN024ATM; Start 1346; Stop 1370
catttggtcaaggaatttcagtaac

SEQ ID NO: 477681 - DNA, 25 bp, Artificial
  probe
  misc_feature (1)..(25): SEQ ID NO: 7809; WAN024ATM; Start 1357; Stop 1381
ggaatttcagtaacacaaacacaaa

SEQ ID NO: 477682 - DNA, 25 bp, Artificial
  probe
  misc_feature (1)..(25): SEQ ID NO: 7809; WAN024ATM; Start 1345; Stop 1369
tcatttggtcaaggaatttcagtaa

SEQ ID NO: 477683 - DNA, 25 bp, Artificial
  probe
  misc_feature (1)..(25): SEQ ID NO: 7809; WAN024ATM; Start 1558; Stop 1582
acggaccctatatatggaactatgt

SEQ ID NO: 477684 - DNA, 25 bp, Artificial
  probe
  misc_feature (1)..(25): SEQ ID NO: 7809; WAN024ATM; Start 1557; Stop 1581
gacggaccctatatatggaactatg

SEQ ID NO: 477685 - DNA, 25 bp, Artificial
  probe
  misc_feature (1)..(25): SEQ ID NO: 7809; WAN024ATM; Start 1556; Stop 1580
ggacggaccctatatatggaactat

SEQ ID NO: 477686 - DNA, 25 bp, Artificial
  probe
  misc_feature (1)..(25): SEQ ID NO: 7809; WAN024ATM; Start 2092; Stop 2116
gatatgtatggttggacaaaggaga

SEQ ID NO: 477687 - DNA, 25 bp, Artificial
  probe
  misc_feature (1)..(25): SEQ ID NO: 7809; WAN024ATM; Start 2091; Stop 2115
agatatgtatggttggacaaaggag

SEQ ID NO: 477688 - DNA, 25 bp, Artificial
  probe
  misc_feature (1)..(25): SEQ ID NO: 7809; WAN024ATM; Start 2093; Stop 2117
atatgtatggttggacaaaggagac

SEQ ID NO: 477689 - DNA, 25 bp, Artificial
  probe
  misc_feature (1)..(25): SEQ ID NO: 7809; WAN024ATM; Start 2090; Stop 2114
cagatatgtatggttggacaaagga

SEQ ID NO: 477690 - DNA, 25 bp, Artificial
  probe
  misc_feature (1)..(25): SEQ ID NO: 7809; WAN024ATM; Start 2094; Stop 2118
tatgtatggttggacaaaggagact

SEQ ID NO: 477691 - DNA, 25 bp, Artificial
  probe
  misc_feature (1)..(25): SEQ ID NO: 7809; WAN024ATM; Start 1343; Stop 1367
gctcatttggtcaaggaatttcagt

SEQ ID NO: 477692 - DNA, 25 bp, Artificial
  probe
  misc_feature (1)..(25): SEQ ID NO: 7809; WAN024ATM; Start 1559; Stop 1583
cggaccctatatatggaactatgta

SEQ ID NO: 477693 - DNA, 25 bp, Artificial
  probe
  misc_feature (1)..(25): SEQ ID NO: 7809; WAN024ATM; Start 2126; Stop 2150
cccttgctaagtggctcaatataga

SEQ ID NO: 477694 - DNA, 25 bp, Artificial
  probe
  misc_feature (1)..(25): SEQ ID NO: 7809; WAN024ATM; Start 2125; Stop 2149
acccttgctaagtggctcaatatag

SEQ ID NO: 477695 - DNA, 25 bp, Artificial
  probe
  misc_feature (1)..(25): SEQ ID NO: 7809; WAN024ATM; Start 2124; Stop 2148
gacccttgctaagtggctcaatata

SEQ ID NO: 477696 - DNA, 25 bp, Artificial
  probe
  misc_feature (1)..(25): SEQ ID NO: 7809; WAN024ATM; Start 1340; Stop 1364
aaagctcatttggtcaaggaatttc

SEQ ID NO: 477697 - DNA, 25 bp, Artificial
  probe
  misc_feature (1)..(25): SEQ ID NO: 7809; WAN024ATM; Start 1935; Stop 1959
acctggtgatttagcagaagaattg

SEQ ID NO: 477698 - DNA, 25 bp, Artificial
  probe
  misc_feature (1)..(25): SEQ ID NO: 7809; WAN024ATM; Start 1341; Stop 1365
aagctcatttggtcaaggaatttca

SEQ ID NO: 477699 - DNA, 25 bp, Artificial
  probe
  misc_feature (1)..(25): SEQ ID NO: 7812; WAN024GKM; Start 528; Stop 552
aatacacgatggatggttggctatt

SEQ ID NO: 477700 - DNA, 25 bp, Artificial
  probe
  misc_feature (1)..(25): SEQ ID NO: 7812; WAN024GKM; Start 1016; Stop 1040
taccttgtgaaataccagaaagttg

SEQ ID NO: 477701 - DNA, 25 bp, Artificial
  probe
  misc_feature (1)..(25): SEQ ID NO: 7812; WAN024GKM; Start 527; Stop 551
caatacacgatggatggttggctat

SEQ ID NO: 477702 - DNA, 25 bp, Artificial
  probe
  misc_feature (1)..(25): SEQ ID NO: 7812; WAN024GKM; Start 1014; Stop 1038
agtaccttgtgaaataccagaaagt

SEQ ID NO: 477703 - DNA, 25 bp, Artificial
  probe
  misc_feature (1)..(25): SEQ ID NO: 7812; WAN024GKM; Start 1011; Stop 1035
ggaagtaccttgtgaaataccagaa

SEQ ID NO: 477704 - DNA, 25 bp, Artificial
  probe
  misc_feature (1)..(25): SEQ ID NO: 7812; WAN024GKM; Start 1015; Stop 1039
gtaccttgtgaaataccagaaagtt

SEQ ID NO: 477705 - DNA, 25 bp, Artificial
  probe
  misc_feature (1)..(25): SEQ ID NO: 7812; WAN024GKM; Start 1012; Stop 1036
gaagtaccttgtgaaataccagaaa

SEQ ID NO: 477706 - DNA, 25 bp, Artificial
  probe
  misc_feature (1)..(25): SEQ ID NO: 7812; WAN024GKM; Start 1013; Stop 1037
aagtaccttgtgaaataccagaaag

SEQ ID NO: 477707 - DNA, 25 bp, Artificial
  probe
  misc_feature (1)..(25): SEQ ID NO: 7812; WAN024GKM; Start 529; Stop 553
atacacgatggatggttggctattt

SEQ ID NO: 477708 - DNA, 25 bp, Artificial
  probe
  misc_feature (1)..(25): SEQ ID NO: 7812; WAN024GKM; Start 1545; Stop 1569
cgcccatattgacgcactaatttag

SEQ ID NO: 477709 - DNA, 25 bp, Artificial
  probe
  misc_feature (1)..(25): SEQ ID NO: 7812; WAN024GKM; Start 1022; Stop 1046
gtgaaataccagaaagttgggaatg

SEQ ID NO: 477710 - DNA, 25 bp, Artificial
  probe
  misc_feature (1)..(25): SEQ ID NO: 7812; WAN024GKM; Start 1021; Stop 1045
tgtgaaataccagaaagttgggaat

SEQ ID NO: 477711 - DNA, 25 bp, Artificial
  probe
  misc_feature (1)..(25): SEQ ID NO: 7812; WAN024GKM; Start 310; Stop 334
tctccacgaccaatcaaagattatc

SEQ ID NO: 477712 - DNA, 25 bp, Artificial
  probe
  misc_feature (1)..(25): SEQ ID NO: 7812; WAN024GKM; Start 309; Stop 333
ctctccacgaccaatcaaagattat

SEQ ID NO: 477713 - DNA, 25 bp, Artificial
  probe
  misc_feature (1)..(25): SEQ ID NO: 7812; WAN024GKM; Start 1020; Stop 1044
ttgtgaaataccagaaagttgggaa

SEQ ID NO: 477714 - DNA, 25 bp, Artificial
  probe
  misc_feature (1)..(25): SEQ ID NO: 7812; WAN024GKM; Start 311; Stop 335
ctccacgaccaatcaaagattatct

SEQ ID NO: 477715 - DNA, 25 bp, Artificial
  probe
  misc_feature (1)..(25): SEQ ID NO: 7812; WAN024GKM; Start 1544; Stop 1568
tcgcccatattgacgcactaattta

SEQ ID NO: 477716 - DNA, 25 bp, Artificial
  probe
  misc_feature (1)..(25): SEQ ID NO: 7812; WAN024GKM; Start 1019; Stop 1043
cttgtgaaataccagaaagttggga

SEQ ID NO: 477717 - DNA, 25 bp, Artificial
  probe
  misc_feature (1)..(25): SEQ ID NO: 7812; WAN024GKM; Start 1023; Stop 1047
tgaaataccagaaagttgggaatgg

SEQ ID NO: 477718 - DNA, 25 bp, Artificial
  probe
  misc_feature (1)..(25): SEQ ID NO: 7812; WAN024GKM; Start 530; Stop 554
tacacgatggatggttggctatttc

SEQ ID NO: 477719 - DNA, 25 bp, Artificial
  probe
  misc_feature (1)..(25): SEQ ID NO: 7812; WAN024GKM; Start 513; Stop 537
gaatgttgatggtgcaatacacgat

SEQ ID NO: 477720 - DNA, 25 bp, Artificial
  probe
  misc_feature (1)..(25): SEQ ID NO: 7812; WAN024GKM; Start 1017; Stop 1041
accttgtgaaataccagaaagttgg

SEQ ID NO: 477721 - DNA, 25 bp, Artificial
  probe
  misc_feature (1)..(25): SEQ ID NO: 7812; WAN024GKM; Start 514; Stop 538
aatgttgatggtgcaatacacgatg

SEQ ID NO: 477722 - DNA, 25 bp, Artificial
  probe
  misc_feature (1)..(25): SEQ ID NO: 7812; WAN024GKM; Start 511; Stop 535
ttgaatgttgatggtgcaatacacg

SEQ ID NO: 477723 - DNA, 25 bp, Artificial
  probe
  misc_feature (1)..(25): SEQ ID NO: 7812; WAN024GKM; Start 1018; Stop 1042
ccttgtgaaataccagaaagttggg

SEQ ID NO: 477724 - DNA, 25 bp, Artificial
  probe
  misc_feature (1)..(25): SEQ ID NO: 7812; WAN024GKM; Start 371; Stop 395
taggtgatactgaaaagggtgaaaa

SEQ ID NO: 477725 - DNA, 25 bp, Artificial
  probe
  misc_feature (1)..(25): SEQ ID NO: 7812; WAN024GKM; Start 370; Stop 394
ataggtgatactgaaaagggtgaaa

SEQ ID NO: 477726 - DNA, 25 bp, Artificial
  probe
  misc_feature (1)..(25): SEQ ID NO: 7812; WAN024GKM; Start 369; Stop 393
aataggtgatactgaaaagggtgaa

SEQ ID NO: 477727 - DNA, 25 bp, Artificial
  probe
  misc_feature (1)..(25): SEQ ID NO: 7812; WAN024GKM; Start 368; Stop 392
aaataggtgatactgaaaagggtga

SEQ ID NO: 477728 - DNA, 25 bp, Artificial
  probe
  misc_feature (1)..(25): SEQ ID NO: 7812; WAN024GKM; Start 1358; Stop 1382
gggttattaattgccatttcatcta

SEQ ID NO: 477729 - DNA, 25 bp, Artificial
  probe
  misc_feature (1)..(25): SEQ ID NO: 7812; WAN024GKM; Start 1543; Stop 1567
ttcgcccatattgacgcactaattt

SEQ ID NO: 477730 - DNA, 25 bp, Artificial
  probe
  misc_feature (1)..(25): SEQ ID NO: 7812; WAN024GKM; Start 372; Stop 396
aggtgatactgaaaagggtgaaaag

SEQ ID NO: 477731 - DNA, 25 bp, Artificial
  probe
  misc_feature (1)..(25): SEQ ID NO: 7812; WAN024GKM; Start 367; Stop 391
aaaataggtgatactgaaaagggtg

SEQ ID NO: 477732 - DNA, 25 bp, Artificial
  probe
  misc_feature (1)..(25): SEQ ID NO: 7813; WAN024B2Q; Start 480; Stop 504
acaagtacaaacaatgttggaacag

SEQ ID NO: 477733 - DNA, 25 bp, Artificial
  probe
  misc_feature (1)..(25): SEQ ID NO: 7813; WAN024B2Q; Start 248; Stop 272
ctaaaatgcgacagaaacgaaaata

SEQ ID NO: 477734 - DNA, 25 bp, Artificial
  probe
  misc_feature (1)..(25): SEQ ID NO: 7813; WAN024B2Q; Start 247; Stop 271
gctaaaatgcgacagaaacgaaaat

SEQ ID NO: 477735 - DNA, 25 bp, Artificial
  probe
  misc_feature (1)..(25): SEQ ID NO: 7813; WAN024B2Q; Start 249; Stop 273
taaaatgcgacagaaacgaaaatat

SEQ ID NO: 477736 - DNA, 25 bp, Artificial
  probe
  misc_feature (1)..(25): SEQ ID NO: 7813; WAN024B2Q; Start 479; Stop 503
aacaagtacaaacaatgttggaaca

SEQ ID NO: 477737 - DNA, 25 bp, Artificial
  probe
  misc_feature (1)..(25): SEQ ID NO: 7813; WAN024B2Q; Start 478; Stop 502
gaacaagtacaaacaatgttggaac

SEQ ID NO: 477738 - DNA, 25 bp, Artificial
  probe
  misc_feature (1)..(25): SEQ ID NO: 7813; WAN024B2Q; Start 477; Stop 501
agaacaagtacaaacaatgttggaa

SEQ ID NO: 477739 - DNA, 25 bp, Artificial
  probe
  misc_feature (1)..(25): SEQ ID NO: 7813; WAN024B2Q; Start 476; Stop 500
tagaacaagtacaaacaatgttgga

SEQ ID NO: 477740 - DNA, 25 bp, Artificial
  probe
  misc_feature (1)..(25): SEQ ID NO: 7813; WAN024B2Q; Start 251; Stop 275
aaatgcgacagaaacgaaaatattc

SEQ ID NO: 477741 - DNA, 25 bp, Artificial
  probe
  misc_feature (1)..(25): SEQ ID NO: 7813; WAN024B2Q; Start 250; Stop 274
aaaatgcgacagaaacgaaaatatt

SEQ ID NO: 477742 - DNA, 25 bp, Artificial
  probe
  misc_feature (1)..(25): SEQ ID NO: 7813; WAN024B2Q; Start 241; Stop 265
ttacaagctaaaatgcgacagaaac

SEQ ID NO: 477743 - DNA, 25 bp, Artificial
  probe
  misc_feature (1)..(25): SEQ ID NO: 7813; WAN024B2Q; Start 240; Stop 264
tttacaagctaaaatgcgacagaaa

SEQ ID NO: 477744 - DNA, 25 bp, Artificial
  probe
  misc_feature (1)..(25): SEQ ID NO: 7813; WAN024B2Q; Start 475; Stop 499
ttagaacaagtacaaacaatgttgg

SEQ ID NO: 477745 - DNA, 25 bp, Artificial
  probe
  misc_feature (1)..(25): SEQ ID NO: 7813; WAN024B2Q; Start 236; Stop 260
tcaatttacaagctaaaatgcgaca

SEQ ID NO: 477746 - DNA, 25 bp, Artificial
  probe
  misc_feature (1)..(25): SEQ ID NO: 7813; WAN024B2Q; Start 239; Stop 263
atttacaagctaaaatgcgacagaa

SEQ ID NO: 477747 - DNA, 25 bp, Artificial
  probe
  misc_feature (1)..(25): SEQ ID NO: 7813; WAN024B2Q; Start 238; Stop 262
aatttacaagctaaaatgcgacaga

SEQ ID NO: 477748 - DNA, 25 bp, Artificial
  probe
  misc_feature (1)..(25): SEQ ID NO: 7813; WAN024B2Q; Start 237; Stop 261
caatttacaagctaaaatgcgacag

SEQ ID NO: 477749 - DNA, 25 bp, Artificial
  probe
  misc_feature (1)..(25): SEQ ID NO: 7813; WAN024B2Q; Start 235; Stop 259
ctcaatttacaagctaaaatgcgac

SEQ ID NO: 477750 - DNA, 25 bp, Artificial
  probe
  misc_feature (1)..(25): SEQ ID NO: 7813; WAN024B2Q; Start 246; Stop 270
agctaaaatgcgacagaaacgaaaa

SEQ ID NO: 477751 - DNA, 25 bp, Artificial
  probe
  misc_feature (1)..(25): SEQ ID NO: 7813; WAN024B2Q; Start 245; Stop 269
aagctaaaatgcgacagaaacgaaa

SEQ ID NO: 477752 - DNA, 25 bp, Artificial
  probe
  misc_feature (1)..(25): SEQ ID NO: 7813; WAN024B2Q; Start 242; Stop 266
tacaagctaaaatgcgacagaaacg

SEQ ID NO: 477753 - DNA, 25 bp, Artificial
  probe
  misc_feature (1)..(25): SEQ ID NO: 7813; WAN024B2Q; Start 255; Stop 279
gcgacagaaacgaaaatattcttct

SEQ ID NO: 477754 - DNA, 25 bp, Artificial
  probe
  misc_feature (1)..(25): SEQ ID NO: 7813; WAN024B2Q; Start 253; Stop 277
atgcgacagaaacgaaaatattctt

SEQ ID NO: 477755 - DNA, 25 bp, Artificial
  probe
  misc_feature (1)..(25): SEQ ID NO: 7813; WAN024B2Q; Start 252; Stop 276
aatgcgacagaaacgaaaatattct

SEQ ID NO: 477756 - DNA, 25 bp, Artificial
  probe
  misc_feature (1)..(25): SEQ ID NO: 7813; WAN024B2Q; Start 254; Stop 278
tgcgacagaaacgaaaatattcttc

SEQ ID NO: 477757 - DNA, 25 bp, Artificial
  probe
  misc_feature (1)..(25): SEQ ID NO: 7813; WAN024B2Q; Start 244; Stop 268
caagctaaaatgcgacagaaacgaa

SEQ ID NO: 477758 - DNA, 25 bp, Artificial
  probe
  misc_feature (1)..(25): SEQ ID NO: 7813; WAN024B2Q; Start 256; Stop 280
cgacagaaacgaaaatattcttctc

SEQ ID NO: 477759 - DNA, 25 bp, Artificial
  probe
  misc_feature (1)..(25): SEQ ID NO: 7813; WAN024B2Q; Start 243; Stop 267
acaagctaaaatgcgacagaaacga

SEQ ID NO: 477760 - DNA, 25 bp, Artificial
  probe
  misc_feature (1)..(25): SEQ ID NO: 7817; WAN024AZP; Start 2; Stop 26
tgcacatcactataggatctaatga

SEQ ID NO: 477761 - DNA, 25 bp, Artificial
  probe
  misc_feature (1)..(25): SEQ ID NO: 7817; WAN024AZP; Start 1; Stop 25
atgcacatcactataggatctaatg

SEQ ID NO: 477762 - DNA, 25 bp, Artificial
  probe
  misc_feature (1)..(25): SEQ ID NO: 7817; WAN024AZP; Start 3; Stop 27
gcacatcactataggatctaatgaa

SEQ ID NO: 477763 - DNA, 25 bp, Artificial
  probe
  misc_feature (1)..(25): SEQ ID NO: 7817; WAN024AZP; Start 4; Stop 28
cacatcactataggatctaatgaaa

SEQ ID NO: 477764 - DNA, 25 bp, Artificial
  probe
  misc_feature (1)..(25): SEQ ID NO: 7817; WAN024AZP; Start 10; Stop 34
actataggatctaatgaaaatcaca

SEQ ID NO: 477765 - DNA, 25 bp, Artificial
  probe
  misc_feature (1)..(25): SEQ ID NO: 7817; WAN024AZP; Start 5; Stop 29
acatcactataggatctaatgaaaa

SEQ ID NO: 477766 - DNA, 25 bp, Artificial
  probe
  misc_feature (1)..(25): SEQ ID NO: 7817; WAN024AZP; Start 9; Stop 33
cactataggatctaatgaaaatcac

SEQ ID NO: 477767 - DNA, 25 bp, Artificial
  probe
  misc_feature (1)..(25): SEQ ID NO: 7817; WAN024AZP; Start 8; Stop 32
tcactataggatctaatgaaaatca

SEQ ID NO: 477768 - DNA, 25 bp, Artificial
  probe
  misc_feature (1)..(25): SEQ ID NO: 7819; WAN024B5I; Start 328; Stop 352
attgctcaaaagttaattgaaaaga

SEQ ID NO: 477769 - DNA, 25 bp, Artificial
  probe
  misc_feature (1)..(25): SEQ ID NO: 7820; WAN024B5L; Start 350; Stop 374
agatttctatgactgatattgccca

SEQ ID NO: 477770 - DNA, 25 bp, Artificial
  probe
  misc_feature (1)..(25): SEQ ID NO: 7820; WAN024B5L; Start 349; Stop 373
aagatttctatgactgatattgccc

SEQ ID NO: 477771 - DNA, 25 bp, Artificial
  probe
  misc_feature (1)..(25): SEQ ID NO: 7820; WAN024B5L; Start 351; Stop 375
gatttctatgactgatattgcccat

SEQ ID NO: 477772 - DNA, 25 bp, Artificial
  probe
  misc_feature (1)..(25): SEQ ID NO: 7820; WAN024B5L; Start 348; Stop 372
aaagatttctatgactgatattgcc

SEQ ID NO: 477773 - DNA, 25 bp, Artificial
  probe
  misc_feature (1)..(25): SEQ ID NO: 7820; WAN024B5L; Start 303; Stop 327
aatccctcgtatcatcaaccaaaag

SEQ ID NO: 477774 - DNA, 25 bp, Artificial
  probe
  misc_feature (1)..(25): SEQ ID NO: 7820; WAN024B5L; Start 306; Stop 330
ccctcgtatcatcaaccaaaagatt

SEQ ID NO: 477775 - DNA, 25 bp, Artificial
  probe
  misc_feature (1)..(25): SEQ ID NO: 7820; WAN024B5L; Start 316; Stop 340
atcaaccaaaagattgctcaaaagt

SEQ ID NO: 477776 - DNA, 25 bp, Artificial
  probe
  misc_feature (1)..(25): SEQ ID NO: 7820; WAN024B5L; Start 315; Stop 339
catcaaccaaaagattgctcaaaag

SEQ ID NO: 477777 - DNA, 25 bp, Artificial
  probe
  misc_feature (1)..(25): SEQ ID NO: 7820; WAN024B5L; Start 314; Stop 338
tcatcaaccaaaagattgctcaaaa

SEQ ID NO: 477778 - DNA, 25 bp, Artificial
  probe
  misc_feature (1)..(25): SEQ ID NO: 7820; WAN024B5L; Start 313; Stop 337
atcatcaaccaaaagattgctcaaa

SEQ ID NO: 477779 - DNA, 25 bp, Artificial
  probe
  misc_feature (1)..(25): SEQ ID NO: 7820; WAN024B5L; Start 317; Stop 341
tcaaccaaaagattgctcaaaagtt

SEQ ID NO: 477780 - DNA, 25 bp, Artificial
  probe
  misc_feature (1)..(25): SEQ ID NO: 7820; WAN024B5L; Start 307; Stop 331
cctcgtatcatcaaccaaaagattg

SEQ ID NO: 477781 - DNA, 25 bp, Artificial
  probe
  misc_feature (1)..(25): SEQ ID NO: 7820; WAN024B5L; Start 312; Stop 336
tatcatcaaccaaaagattgctcaa

SEQ ID NO: 477782 - DNA, 25 bp, Artificial
  probe
  misc_feature (1)..(25): SEQ ID NO: 7820; WAN024B5L; Start 310; Stop 334
cgtatcatcaaccaaaagattgctc

SEQ ID NO: 477783 - DNA, 25 bp, Artificial
  probe
  misc_feature (1)..(25): SEQ ID NO: 7820; WAN024B5L; Start 308; Stop 332
ctcgtatcatcaaccaaaagattgc

SEQ ID NO: 477784 - DNA, 25 bp, Artificial
  probe
  misc_feature (1)..(25): SEQ ID NO: 7820; WAN024B5L; Start 309; Stop 333
tcgtatcatcaaccaaaagattgct

SEQ ID NO: 477785 - DNA, 25 bp, Artificial
  probe
  misc_feature (1)..(25): SEQ ID NO: 7820; WAN024B5L; Start 304; Stop 328
atccctcgtatcatcaaccaaaaga

SEQ ID NO: 477786 - DNA, 25 bp, Artificial
  probe
  misc_feature (1)..(25): SEQ ID NO: 7820; WAN024B5L; Start 305; Stop 329
tccctcgtatcatcaaccaaaagat

SEQ ID NO: 477787 - DNA, 25 bp, Artificial
  probe
  misc_feature (1)..(25): SEQ ID NO: 7820; WAN024B5L; Start 347; Stop 371
aaaagatttctatgactgatattgc

SEQ ID NO: 477788 - DNA, 25 bp, Artificial
  probe
  misc_feature (1)..(25): SEQ ID NO: 7822; WAN024AWL; Start 391; Stop 415
tggagcgaaagtagtcattatgttt

SEQ ID NO: 477789 - DNA, 25 bp, Artificial
  probe
  misc_feature (1)..(25): SEQ ID NO: 7822; WAN024AWL; Start 392; Stop 416
ggagcgaaagtagtcattatgttta

SEQ ID NO: 477790 - DNA, 25 bp, Artificial
  probe
  misc_feature (1)..(25): SEQ ID NO: 7822; WAN024AWL; Start 25; Stop 49
aagacagttatttgcggaattatca

SEQ ID NO: 477791 - DNA, 25 bp, Artificial
  probe
  misc_feature (1)..(25): SEQ ID NO: 7822; WAN024AWL; Start 26; Stop 50
agacagttatttgcggaattatcaa

SEQ ID NO: 477792 - DNA, 25 bp, Artificial
  probe
  misc_feature (1)..(25): SEQ ID NO: 7822; WAN024AWL; Start 24; Stop 48
aaagacagttatttgcggaattatc

SEQ ID NO: 477793 - DNA, 25 bp, Artificial
  probe
  misc_feature (1)..(25): SEQ ID NO: 7822; WAN024AWL; Start 29; Stop 53
cagttatttgcggaattatcaatgt

SEQ ID NO: 477794 - DNA, 25 bp, Artificial
  probe
  misc_feature (1)..(25): SEQ ID NO: 7822; WAN024AWL; Start 28; Stop 52
acagttatttgcggaattatcaatg

SEQ ID NO: 477795 - DNA, 25 bp, Artificial
  probe
  misc_feature (1)..(25): SEQ ID NO: 7822; WAN024AWL; Start 27; Stop 51
gacagttatttgcggaattatcaat

SEQ ID NO: 477796 - DNA, 25 bp, Artificial
  probe
  misc_feature (1)..(25): SEQ ID NO: 7822; WAN024AWL; Start 716; Stop 740
aagcggtttgtcatcaatatccttg

SEQ ID NO: 477797 - DNA, 25 bp, Artificial
  probe
  misc_feature (1)..(25): SEQ ID NO: 7822; WAN024AWL; Start 715; Stop 739
caagcggtttgtcatcaatatcctt

SEQ ID NO: 477798 - DNA, 25 bp, Artificial
  probe
  misc_feature (1)..(25): SEQ ID NO: 7822; WAN024AWL; Start 393; Stop 417
gagcgaaagtagtcattatgtttaa

SEQ ID NO: 477799 - DNA, 25 bp, Artificial
  probe
  misc_feature (1)..(25): SEQ ID NO: 7822; WAN024AWL; Start 13; Stop 37
gccaatcatgcaaagacagttattt

SEQ ID NO: 477800 - DNA, 25 bp, Artificial
  probe
  misc_feature (1)..(25): SEQ ID NO: 7822; WAN024AWL; Start 406; Stop 430
cattatgtttaatccagtcatggcg

SEQ ID NO: 477801 - DNA, 25 bp, Artificial
  probe
  misc_feature (1)..(25): SEQ ID NO: 7822; WAN024AWL; Start 405; Stop 429
tcattatgtttaatccagtcatggc

SEQ ID NO: 477802 - DNA, 25 bp, Artificial
  probe
  misc_feature (1)..(25): SEQ ID NO: 7822; WAN024AWL; Start 5; Stop 29
caagtaaagccaatcatgcaaagac

SEQ ID NO: 477803 - DNA, 25 bp, Artificial
  probe
  misc_feature (1)..(25): SEQ ID NO: 7822; WAN024AWL; Start 4; Stop 28
tcaagtaaagccaatcatgcaaaga

SEQ ID NO: 477804 - DNA, 25 bp, Artificial
  probe
  misc_feature (1)..(25): SEQ ID NO: 7822; WAN024AWL; Start 3; Stop 27
gtcaagtaaagccaatcatgcaaag

SEQ ID NO: 477805 - DNA, 25 bp, Artificial
  probe
  misc_feature (1)..(25): SEQ ID NO: 7822; WAN024AWL; Start 12; Stop 36
agccaatcatgcaaagacagttatt

SEQ ID NO: 477806 - DNA, 25 bp, Artificial
  probe
  misc_feature (1)..(25): SEQ ID NO: 7822; WAN024AWL; Start 11; Stop 35
aagccaatcatgcaaagacagttat

SEQ ID NO: 477807 - DNA, 25 bp, Artificial
  probe
  misc_feature (1)..(25): SEQ ID NO: 7822; WAN024AWL; Start 30; Stop 54
agttatttgcggaattatcaatgta

SEQ ID NO: 477808 - DNA, 25 bp, Artificial
  probe
  misc_feature (1)..(25): SEQ ID NO: 7822; WAN024AWL; Start 10; Stop 34
aaagccaatcatgcaaagacagtta

SEQ ID NO: 477809 - DNA, 25 bp, Artificial
  probe
  misc_feature (1)..(25): SEQ ID NO: 7822; WAN024AWL; Start 9; Stop 33
taaagccaatcatgcaaagacagtt

SEQ ID NO: 477810 - DNA, 25 bp, Artificial
  probe
  misc_feature (1)..(25): SEQ ID NO: 7822; WAN024AWL; Start 6; Stop 30
aagtaaagccaatcatgcaaagaca

SEQ ID NO: 477811 - DNA, 25 bp, Artificial
  probe
  misc_feature (1)..(25): SEQ ID NO: 7822; WAN024AWL; Start 394; Stop 418
agcgaaagtagtcattatgtttaat

SEQ ID NO: 477812 - DNA, 25 bp, Artificial
  probe
  misc_feature (1)..(25): SEQ ID NO: 7822; WAN024AWL; Start 2; Stop 26
tgtcaagtaaagccaatcatgcaaa

SEQ ID NO: 477813 - DNA, 25 bp, Artificial
  probe
  misc_feature (1)..(25): SEQ ID NO: 7822; WAN024AWL; Start 1; Stop 25
atgtcaagtaaagccaatcatgcaa

SEQ ID NO: 477814 - DNA, 25 bp, Artificial
  probe
  misc_feature (1)..(25): SEQ ID NO: 7822; WAN024AWL; Start 395; Stop 419
gcgaaagtagtcattatgtttaatc

SEQ ID NO: 477815 - DNA, 25 bp, Artificial
  probe
  misc_feature (1)..(25): SEQ ID NO: 7822; WAN024AWL; Start 7; Stop 31
agtaaagccaatcatgcaaagacag

SEQ ID NO: 477816 - DNA, 25 bp, Artificial
  probe
  misc_feature (1)..(25): SEQ ID NO: 7822; WAN024AWL; Start 403; Stop 427
agtcattatgtttaatccagtcatg

SEQ ID NO: 477817 - DNA, 25 bp, Artificial
  probe
  misc_feature (1)..(25): SEQ ID NO: 7822; WAN024AWL; Start 401; Stop 425
gtagtcattatgtttaatccagtca

SEQ ID NO: 477818 - DNA, 25 bp, Artificial
  probe
  misc_feature (1)..(25): SEQ ID NO: 7822; WAN024AWL; Start 629; Stop 653
ctgaccaagaaagaaaatctgcttc

SEQ ID NO: 477819 - DNA, 25 bp, Artificial
  probe
  misc_feature (1)..(25): SEQ ID NO: 7822; WAN024AWL; Start 719; Stop 743
cggtttgtcatcaatatccttgaag

SEQ ID NO: 477820 - DNA, 25 bp, Artificial
  probe
  misc_feature (1)..(25): SEQ ID NO: 7822; WAN024AWL; Start 628; Stop 652
tctgaccaagaaagaaaatctgctt

SEQ ID NO: 477821 - DNA, 25 bp, Artificial
  probe
  misc_feature (1)..(25): SEQ ID NO: 7823; WAN024DSK; Start 168; Stop 192
gaagaagtatgctgatgaagtcgag

SEQ ID NO: 477822 - DNA, 25 bp, Artificial
  probe
  misc_feature (1)..(25): SEQ ID NO: 7823; WAN024DSK; Start 169; Stop 193
aagaagtatgctgatgaagtcgagt

SEQ ID NO: 477823 - DNA, 25 bp, Artificial
  probe
  misc_feature (1)..(25): SEQ ID NO: 7823; WAN024DSK; Start 170; Stop 194
agaagtatgctgatgaagtcgagtc

SEQ ID NO: 477824 - DNA, 25 bp, Artificial
  probe
  misc_feature (1)..(25): SEQ ID NO: 7823; WAN024DSK; Start 171; Stop 195
gaagtatgctgatgaagtcgagtcg

SEQ ID NO: 477825 - DNA, 25 bp, Artificial
  probe
  misc_feature (1)..(25): SEQ ID NO: 7823; WAN024DSK; Start 167; Stop 191
cgaagaagtatgctgatgaagtcga

SEQ ID NO: 477826 - DNA, 25 bp, Artificial
  probe
  misc_feature (1)..(25): SEQ ID NO: 7823; WAN024DSK; Start 166; Stop 190
tcgaagaagtatgctgatgaagtcg

SEQ ID NO: 477827 - DNA, 25 bp, Artificial
  probe
  misc_feature (1)..(25): SEQ ID NO: 7823; WAN024DSK; Start 110; Stop 134
cagaaggggttagaagtgggaataa

SEQ ID NO: 477828 - DNA, 25 bp, Artificial
  probe
  misc_feature (1)..(25): SEQ ID NO: 7823; WAN024DSK; Start 111; Stop 135
agaaggggttagaagtgggaataac

SEQ ID NO: 477829 - DNA, 25 bp, Artificial
  probe
  misc_feature (1)..(25): SEQ ID NO: 7823; WAN024DSK; Start 172; Stop 196
aagtatgctgatgaagtcgagtcgc

SEQ ID NO: 477830 - DNA, 25 bp, Artificial
  probe
  misc_feature (1)..(25): SEQ ID NO: 7823; WAN024DSK; Start 109; Stop 133
gcagaaggggttagaagtgggaata

SEQ ID NO: 477831 - DNA, 25 bp, Artificial
  probe
  misc_feature (1)..(25): SEQ ID NO: 7823; WAN024DSK; Start 175; Stop 199
tatgctgatgaagtcgagtcgcatc

SEQ ID NO: 477832 - DNA, 25 bp, Artificial
  probe
  misc_feature (1)..(25): SEQ ID NO: 7823; WAN024DSK; Start 174; Stop 198
gtatgctgatgaagtcgagtcgcat

SEQ ID NO: 477833 - DNA, 25 bp, Artificial
  probe
  misc_feature (1)..(25): SEQ ID NO: 7824; WAN024DSS; Start 390; Stop 414
aaaagatacattaccaacagaacca

SEQ ID NO: 477834 - DNA, 25 bp, Artificial
  probe
  misc_feature (1)..(25): SEQ ID NO: 7824; WAN024DSS; Start 576; Stop 600
actagtaaaagaggaagctaaggga

SEQ ID NO: 477835 - DNA, 25 bp, Artificial
  probe
  misc_feature (1)..(25): SEQ ID NO: 7824; WAN024DSS; Start 575; Stop 599
aactagtaaaagaggaagctaaggg

SEQ ID NO: 477836 - DNA, 25 bp, Artificial
  probe
  misc_feature (1)..(25): SEQ ID NO: 7825; WAN024DSE; Start 253; Stop 277
ttgagcgaaattaaacggaagtatt

SEQ ID NO: 477837 - DNA, 25 bp, Artificial
  probe
  misc_feature (1)..(25): SEQ ID NO: 7825; WAN024DSE; Start 252; Stop 276
gttgagcgaaattaaacggaagtat

SEQ ID NO: 477838 - DNA, 25 bp, Artificial
  probe
  misc_feature (1)..(25): SEQ ID NO: 7825; WAN024DSE; Start 291; Stop 315
agttaatggtttagaagagaagtcg

SEQ ID NO: 477839 - DNA, 25 bp, Artificial
  probe
  misc_feature (1)..(25): SEQ ID NO: 7825; WAN024DSE; Start 249; Stop 273
aaagttgagcgaaattaaacggaag

SEQ ID NO: 477840 - DNA, 25 bp, Artificial
  probe
  misc_feature (1)..(25): SEQ ID NO: 7825; WAN024DSE; Start 251; Stop 275
agttgagcgaaattaaacggaagta

SEQ ID NO: 477841 - DNA, 25 bp, Artificial
  probe
  misc_feature (1)..(25): SEQ ID NO: 7825; WAN024DSE; Start 248; Stop 272
caaagttgagcgaaattaaacggaa

SEQ ID NO: 477842 - DNA, 25 bp, Artificial
  probe
  misc_feature (1)..(25): SEQ ID NO: 7825; WAN024DSE; Start 170; Stop 194
cgcatctacaaagtatattgaagga

SEQ ID NO: 477843 - DNA, 25 bp, Artificial
  probe
  misc_feature (1)..(25): SEQ ID NO: 7825; WAN024DSE; Start 169; Stop 193
tcgcatctacaaagtatattgaagg

SEQ ID NO: 477844 - DNA, 25 bp, Artificial
  probe
  misc_feature (1)..(25): SEQ ID NO: 7825; WAN024DSE; Start 165; Stop 189
cgagtcgcatctacaaagtatattg

SEQ ID NO: 477845 - DNA, 25 bp, Artificial
  probe
  misc_feature (1)..(25): SEQ ID NO: 7825; WAN024DSE; Start 256; Stop 280
agcgaaattaaacggaagtatttgt

SEQ ID NO: 477846 - DNA, 25 bp, Artificial
  probe
  misc_feature (1)..(25): SEQ ID NO: 7825; WAN024DSE; Start 254; Stop 278
tgagcgaaattaaacggaagtattt

SEQ ID NO: 477847 - DNA, 25 bp, Artificial
  probe
  misc_feature (1)..(25): SEQ ID NO: 7825; WAN024DSE; Start 166; Stop 190
gagtcgcatctacaaagtatattga

SEQ ID NO: 477848 - DNA, 25 bp, Artificial
  probe
  misc_feature (1)..(25): SEQ ID NO: 7825; WAN024DSE; Start 255; Stop 279
gagcgaaattaaacggaagtatttg

SEQ ID NO: 477849 - DNA, 25 bp, Artificial
  probe
  misc_feature (1)..(25): SEQ ID NO: 7825; WAN024DSE; Start 250; Stop 274
aagttgagcgaaattaaacggaagt

SEQ ID NO: 477850 - DNA, 25 bp, Artificial
  probe
  misc_feature (1)..(25): SEQ ID NO: 7825; WAN024DSE; Start 167; Stop 191
agtcgcatctacaaagtatattgaa

SEQ ID NO: 477851 - DNA, 25 bp, Artificial
  probe
  misc_feature (1)..(25): SEQ ID NO: 7825; WAN024DSE; Start 257; Stop 281
gcgaaattaaacggaagtatttgta

SEQ ID NO: 477852 - DNA, 25 bp, Artificial
  probe
  misc_feature (1)..(25): SEQ ID NO: 7825; WAN024DSE; Start 168; Stop 192
gtcgcatctacaaagtatattgaag

SEQ ID NO: 477853 - DNA, 25 bp, Artificial
  probe
  misc_feature (1)..(25): SEQ ID NO: 7825; WAN024DSE; Start 164; Stop 188
tcgagtcgcatctacaaagtatatt

SEQ ID NO: 477854 - DNA, 25 bp, Artificial
  probe
  misc_feature (1)..(25): SEQ ID NO: 7825; WAN024DSE; Start 163; Stop 187
gtcgagtcgcatctacaaagtatat

SEQ ID NO: 477855 - DNA, 25 bp, Artificial
  probe
  misc_feature (1)..(25): SEQ ID NO: 7825; WAN024DSE; Start 300; Stop 324
tttagaagagaagtcgaaagctgag

SEQ ID NO: 477856 - DNA, 25 bp, Artificial
  probe
  misc_feature (1)..(25): SEQ ID NO: 7825; WAN024DSE; Start 299; Stop 323
gtttagaagagaagtcgaaagctga

SEQ ID NO: 477857 - DNA, 25 bp, Artificial
  probe
  misc_feature (1)..(25): SEQ ID NO: 7825; WAN024DSE; Start 295; Stop 319
aatggtttagaagagaagtcgaaag

SEQ ID NO: 477858 - DNA, 25 bp, Artificial
  probe
  misc_feature (1)..(25): SEQ ID NO: 7825; WAN024DSE; Start 296; Stop 320
atggtttagaagagaagtcgaaagc

SEQ ID NO: 477859 - DNA, 25 bp, Artificial
  probe
  misc_feature (1)..(25): SEQ ID NO: 7825; WAN024DSE; Start 162; Stop 186
agtcgagtcgcatctacaaagtata

SEQ ID NO: 477860 - DNA, 25 bp, Artificial
  probe
  misc_feature (1)..(25): SEQ ID NO: 7825; WAN024DSE; Start 292; Stop 316
gttaatggtttagaagagaagtcga

SEQ ID NO: 477861 - DNA, 25 bp, Artificial
  probe
  misc_feature (1)..(25): SEQ ID NO: 7825; WAN024DSE; Start 298; Stop 322
ggtttagaagagaagtcgaaagctg

SEQ ID NO: 477862 - DNA, 25 bp, Artificial
  probe
  misc_feature (1)..(25): SEQ ID NO: 7825; WAN024DSE; Start 297; Stop 321
tggtttagaagagaagtcgaaagct

SEQ ID NO: 477863 - DNA, 25 bp, Artificial
  probe
  misc_feature (1)..(25): SEQ ID NO: 7825; WAN024DSE; Start 161; Stop 185
aagtcgagtcgcatctacaaagtat

SEQ ID NO: 477864 - DNA, 25 bp, Artificial
  probe
  misc_feature (1)..(25): SEQ ID NO: 7825; WAN024DSE; Start 294; Stop 318
taatggtttagaagagaagtcgaaa

SEQ ID NO: 477865 - DNA, 25 bp, Artificial
  probe
  misc_feature (1)..(25): SEQ ID NO: 7825; WAN024DSE; Start 293; Stop 317
ttaatggtttagaagagaagtcgaa

SEQ ID NO: 477866 - DNA, 25 bp, Artificial
  probe
  misc_feature (1)..(25): SEQ ID NO: 7825; WAN024DSE; Start 290; Stop 314
aagttaatggtttagaagagaagtc

SEQ ID NO: 477867 - DNA, 25 bp, Artificial
  probe
  misc_feature (1)..(25): SEQ ID NO: 7825; WAN024DSE; Start 110; Stop 134
cagaaggggttagaattgggaataa

SEQ ID NO: 477868 - DNA, 25 bp, Artificial
  probe
  misc_feature (1)..(25): SEQ ID NO: 7825; WAN024DSE; Start 160; Stop 184
gaagtcgagtcgcatctacaaagta

SEQ ID NO: 477869 - DNA, 25 bp, Artificial
  probe
  misc_feature (1)..(25): SEQ ID NO: 7827; WAN024AJG; Start 67; Stop 91
gggaattttgtttacaaggagtcta

SEQ ID NO: 477870 - DNA, 25 bp, Artificial
  probe
  misc_feature (1)..(25): SEQ ID NO: 7827; WAN024AJG; Start 66; Stop 90
ggggaattttgtttacaaggagtct

SEQ ID NO: 477871 - DNA, 25 bp, Artificial
  probe
  misc_feature (1)..(25): SEQ ID NO: 7827; WAN024AJG; Start 68; Stop 92
ggaattttgtttacaaggagtctac

SEQ ID NO: 477872 - DNA, 25 bp, Artificial
  probe
  misc_feature (1)..(25): SEQ ID NO: 7827; WAN024AJG; Start 69; Stop 93
gaattttgtttacaaggagtctact

SEQ ID NO: 477873 - DNA, 25 bp, Artificial
  probe
  misc_feature (1)..(25): SEQ ID NO: 7829; WAN024A8M; Start 14; Stop 38
gaaattgttttcctggttttatttt

SEQ ID NO: 477874 - DNA, 25 bp, Artificial
  probe
  misc_feature (1)..(25): SEQ ID NO: 7835; WAN0249LO; Start 27; Stop 51
aaacacaaaaggagggaatgactaa

SEQ ID NO: 477875 - DNA, 25 bp, Artificial
  probe
  misc_feature (1)..(25): SEQ ID NO: 7835; WAN0249LO; Start 26; Stop 50
aaaacacaaaaggagggaatgacta

SEQ ID NO: 477876 - DNA, 25 bp, Artificial
  probe
  misc_feature (1)..(25): SEQ ID NO: 7835; WAN0249LO; Start 28; Stop 52
aacacaaaaggagggaatgactaac

SEQ ID NO: 477877 - DNA, 25 bp, Artificial
  probe
  misc_feature (1)..(25): SEQ ID NO: 7835; WAN0249LO; Start 29; Stop 53
acacaaaaggagggaatgactaacc

SEQ ID NO: 477878 - DNA, 25 bp, Artificial
  probe
  misc_feature (1)..(25): SEQ ID NO: 7835; WAN0249LO; Start 30; Stop 54
cacaaaaggagggaatgactaaccc

SEQ ID NO: 477879 - DNA, 25 bp, Artificial
  probe
  misc_feature (1)..(25): SEQ ID NO: 7840; WAN024AU2; Start 2; Stop 26
gtgacaacattctcaaggtagattc

SEQ ID NO: 477880 - DNA, 25 bp, Artificial
  probe
  misc_feature (1)..(25): SEQ ID NO: 7840; WAN024AU2; Start 3; Stop 27
tgacaacattctcaaggtagattcc

SEQ ID NO: 477881 - DNA, 25 bp, Artificial
  probe
  misc_feature (1)..(25): SEQ ID NO: 7840; WAN024AU2; Start 1; Stop 25
ggtgacaacattctcaaggtagatt

SEQ ID NO: 477882 - DNA, 25 bp, Artificial
  probe
  misc_feature (1)..(25): SEQ ID NO: 7840; WAN024AU2; Start 4; Stop 28
gacaacattctcaaggtagattcct

SEQ ID NO: 477883 - DNA, 25 bp, Artificial
  probe
  misc_feature (1)..(25): SEQ ID NO: 7840; WAN024AU2; Start 397; Stop 421
gaagctatcggtatcgtgattgaaa

SEQ ID NO: 477884 - DNA, 25 bp, Artificial
  probe
  misc_feature (1)..(25): SEQ ID NO: 7840; WAN024AU2; Start 5; Stop 29
acaacattctcaaggtagattcctt

SEQ ID NO: 477885 - DNA, 25 bp, Artificial
  probe
  misc_feature (1)..(25): SEQ ID NO: 7840; WAN024AU2; Start 398; Stop 422
aagctatcggtatcgtgattgaaaa

SEQ ID NO: 477886 - DNA, 25 bp, Artificial
  probe
  misc_feature (1)..(25): SEQ ID NO: 7840; WAN024AU2; Start 6; Stop 30
caacattctcaaggtagattccttt

SEQ ID NO: 477887 - DNA, 25 bp, Artificial
  probe
  misc_feature (1)..(25): SEQ ID NO: 7840; WAN024AU2; Start 89; Stop 113
aatttgcttctgctggcattaccaa

SEQ ID NO: 477888 - DNA, 25 bp, Artificial
  probe
  misc_feature (1)..(25): SEQ ID NO: 7840; WAN024AU2; Start 90; Stop 114
atttgcttctgctggcattaccaag

SEQ ID NO: 477889 - DNA, 25 bp, Artificial
  probe
  misc_feature (1)..(25): SEQ ID NO: 7840; WAN024AU2; Start 88; Stop 112
aaatttgcttctgctggcattacca

SEQ ID NO: 477890 - DNA, 25 bp, Artificial
  probe
  misc_feature (1)..(25): SEQ ID NO: 7840; WAN024AU2; Start 7; Stop 31
aacattctcaaggtagattcctttt

SEQ ID NO: 477891 - DNA, 25 bp, Artificial
  probe
  misc_feature (1)..(25): SEQ ID NO: 7840; WAN024AU2; Start 87; Stop 111
aaaatttgcttctgctggcattacc

SEQ ID NO: 477892 - DNA, 25 bp, Artificial
  probe
  misc_feature (1)..(25): SEQ ID NO: 7842; WAN0249RJ; Start 21; Stop 45
ccactttaagggaattagagagttt

SEQ ID NO: 477893 - DNA, 25 bp, Artificial
  probe
  misc_feature (1)..(25): SEQ ID NO: 7842; WAN0249RJ; Start 59; Stop 83
aaatctcttcaaactacgtcagctt

SEQ ID NO: 477894 - DNA, 25 bp, Artificial
  probe
  misc_feature (1)..(25): SEQ ID NO: 7842; WAN0249RJ; Start 60; Stop 84
aatctcttcaaactacgtcagcttc

SEQ ID NO: 477895 - DNA, 25 bp, Artificial
  probe
  misc_feature (1)..(25): SEQ ID NO: 7842; WAN0249RJ; Start 20; Stop 44
cccactttaagggaattagagagtt

SEQ ID NO: 477896 - DNA, 25 bp, Artificial
  probe
  misc_feature (1)..(25): SEQ ID NO: 7842; WAN0249RJ; Start 7; Stop 31
aaactctctagttcccactttaagg

SEQ ID NO: 477897 - DNA, 25 bp, Artificial
  probe
  misc_feature (1)..(25): SEQ ID NO: 7842; WAN0249RJ; Start 61; Stop 85
atctcttcaaactacgtcagcttcc

SEQ ID NO: 477898 - DNA, 25 bp, Artificial
  probe
  misc_feature (1)..(25): SEQ ID NO: 7842; WAN0249RJ; Start 8; Stop 32
aactctctagttcccactttaaggg

SEQ ID NO: 477899 - DNA, 25 bp, Artificial
  probe
  misc_feature (1)..(25): SEQ ID NO: 7842; WAN0249RJ; Start 65; Stop 89
cttcaaactacgtcagcttccatct

SEQ ID NO: 477900 - DNA, 25 bp, Artificial
  probe
  misc_feature (1)..(25): SEQ ID NO: 7842; WAN0249RJ; Start 64; Stop 88
tcttcaaactacgtcagcttccatc

SEQ ID NO: 477901 - DNA, 25 bp, Artificial
  probe
  misc_feature (1)..(25): SEQ ID NO: 7842; WAN0249RJ; Start 63; Stop 87
ctcttcaaactacgtcagcttccat

SEQ ID NO: 477902 - DNA, 25 bp, Artificial
  probe
  misc_feature (1)..(25): SEQ ID NO: 7842; WAN0249RJ; Start 58; Stop 82
aaaatctcttcaaactacgtcagct

SEQ ID NO: 477903 - DNA, 25 bp, Artificial
  probe
  misc_feature (1)..(25): SEQ ID NO: 7842; WAN0249RJ; Start 56; Stop 80
cgaaaatctcttcaaactacgtcag

SEQ ID NO: 477904 - DNA, 25 bp, Artificial
  probe
  misc_feature (1)..(25): SEQ ID NO: 7842; WAN0249RJ; Start 57; Stop 81
gaaaatctcttcaaactacgtcagc

SEQ ID NO: 477905 - DNA, 25 bp, Artificial
  probe
  misc_feature (1)..(25): SEQ ID NO: 7842; WAN0249RJ; Start 66; Stop 90
ttcaaactacgtcagcttccatctg

SEQ ID NO: 477906 - DNA, 25 bp, Artificial
  probe
  misc_feature (1)..(25): SEQ ID NO: 7842; WAN0249RJ; Start 62; Stop 86
tctcttcaaactacgtcagcttcca

SEQ ID NO: 477907 - DNA, 25 bp, Artificial
  probe
  misc_feature (1)..(25): SEQ ID NO: 7842; WAN0249RJ; Start 22; Stop 46
cactttaagggaattagagagtttt

SEQ ID NO: 477908 - DNA, 25 bp, Artificial
  probe
  misc_feature (1)..(25): SEQ ID NO: 7842; WAN0249RJ; Start 6; Stop 30
aaaactctctagttcccactttaag

SEQ ID NO: 477909 - DNA, 25 bp, Artificial
  probe
  misc_feature (1)..(25): SEQ ID NO: 7842; WAN0249RJ; Start 100; Stop 124
aacactgttttgagctgacttcgtc

SEQ ID NO: 477910 - DNA, 25 bp, Artificial
  probe
  misc_feature (1)..(25): SEQ ID NO: 7842; WAN0249RJ; Start 67; Stop 91
tcaaactacgtcagcttccatctgc

SEQ ID NO: 477911 - DNA, 25 bp, Artificial
  probe
  misc_feature (1)..(25): SEQ ID NO: 7842; WAN0249RJ; Start 99; Stop 123
aaacactgttttgagctgacttcgt

SEQ ID NO: 477912 - DNA, 25 bp, Artificial
  probe
  misc_feature (1)..(25): SEQ ID NO: 7842; WAN0249RJ; Start 98; Stop 122
aaaacactgttttgagctgacttcg

SEQ ID NO: 477913 - DNA, 25 bp, Artificial
  probe
  misc_feature (1)..(25): SEQ ID NO: 7842; WAN0249RJ; Start 101; Stop 125
acactgttttgagctgacttcgtca

SEQ ID NO: 477914 - DNA, 25 bp, Artificial
  probe
  misc_feature (1)..(25): SEQ ID NO: 7845; WAN024B58; Start 75; Stop 99
aagggctaaacatatccatcgtaat

SEQ ID NO: 477915 - DNA, 25 bp, Artificial
  probe
  misc_feature (1)..(25): SEQ ID NO: 7845; WAN024B58; Start 73; Stop 97
gtaagggctaaacatatccatcgta

SEQ ID NO: 477916 - DNA, 25 bp, Artificial
  probe
  misc_feature (1)..(25): SEQ ID NO: 7845; WAN024B58; Start 71; Stop 95
tagtaagggctaaacatatccatcg

SEQ ID NO: 477917 - DNA, 25 bp, Artificial
  probe
  misc_feature (1)..(25): SEQ ID NO: 7845; WAN024B58; Start 74; Stop 98
taagggctaaacatatccatcgtaa

SEQ ID NO: 477918 - DNA, 25 bp, Artificial
  probe
  misc_feature (1)..(25): SEQ ID NO: 7845; WAN024B58; Start 77; Stop 101
gggctaaacatatccatcgtaatga

SEQ ID NO: 477919 - DNA, 25 bp, Artificial
  probe
  misc_feature (1)..(25): SEQ ID NO: 7845; WAN024B58; Start 76; Stop 100
agggctaaacatatccatcgtaatg

SEQ ID NO: 477920 - DNA, 25 bp, Artificial
  probe
  misc_feature (1)..(25): SEQ ID NO: 7845; WAN024B58; Start 72; Stop 96
agtaagggctaaacatatccatcgt

SEQ ID NO: 477921 - DNA, 25 bp, Artificial
  probe
  misc_feature (1)..(25): SEQ ID NO: 7845; WAN024B58; Start 78; Stop 102
ggctaaacatatccatcgtaatgat

SEQ ID NO: 477922 - DNA, 25 bp, Artificial
  probe
  misc_feature (1)..(25): SEQ ID NO: 7845; WAN024B58; Start 70; Stop 94
atagtaagggctaaacatatccatc

SEQ ID NO: 477923 - DNA, 25 bp, Artificial
  probe
  misc_feature (1)..(25): SEQ ID NO: 7845; WAN024B58; Start 79; Stop 103
gctaaacatatccatcgtaatgatt

SEQ ID NO: 477924 - DNA, 25 bp, Artificial
  probe
  misc_feature (1)..(25): SEQ ID NO: 7848; WAN0249WH; Start 11; Stop 35
ctcctttaaattttccgaggtttcc

SEQ ID NO: 477925 - DNA, 25 bp, Artificial
  probe
  misc_feature (1)..(25): SEQ ID NO: 7848; WAN0249WH; Start 10; Stop 34
tctcctttaaattttccgaggtttc

SEQ ID NO: 477926 - DNA, 25 bp, Artificial
  probe
  misc_feature (1)..(25): SEQ ID NO: 7848; WAN0249WH; Start 7; Stop 31
gattctcctttaaattttccgaggt

SEQ ID NO: 477927 - DNA, 25 bp, Artificial
  probe
  misc_feature (1)..(25): SEQ ID NO: 7848; WAN0249WH; Start 6; Stop 30
ggattctcctttaaattttccgagg

SEQ ID NO: 477928 - DNA, 25 bp, Artificial
  probe
  misc_feature (1)..(25): SEQ ID NO: 7848; WAN0249WH; Start 9; Stop 33
ttctcctttaaattttccgaggttt

SEQ ID NO: 477929 - DNA, 25 bp, Artificial
  probe
  misc_feature (1)..(25): SEQ ID NO: 7848; WAN0249WH; Start 8; Stop 32
attctcctttaaattttccgaggtt

SEQ ID NO: 477930 - DNA, 25 bp, Artificial
  probe
  misc_feature (1)..(25): SEQ ID NO: 7848; WAN0249WH; Start 5; Stop 29
tggattctcctttaaattttccgag

SEQ ID NO: 477931 - DNA, 25 bp, Artificial
  probe
  misc_feature (1)..(25): SEQ ID NO: 7848; WAN0249WH; Start 14; Stop 38
ctttaaattttccgaggtttcccct

SEQ ID NO: 477932 - DNA, 25 bp, Artificial
  probe
  misc_feature (1)..(25): SEQ ID NO: 7848; WAN0249WH; Start 12; Stop 36
tcctttaaattttccgaggtttccc

SEQ ID NO: 477933 - DNA, 25 bp, Artificial
  probe
  misc_feature (1)..(25): SEQ ID NO: 7848; WAN0249WH; Start 4; Stop 28
atggattctcctttaaattttccga

SEQ ID NO: 477934 - DNA, 25 bp, Artificial
  probe
  misc_feature (1)..(25): SEQ ID NO: 7848; WAN0249WH; Start 3; Stop 27
gatggattctcctttaaattttccg

SEQ ID NO: 477935 - DNA, 25 bp, Artificial
  probe
  misc_feature (1)..(25): SEQ ID NO: 7848; WAN0249WH; Start 13; Stop 37
cctttaaattttccgaggtttcccc

SEQ ID NO: 477936 - DNA, 25 bp, Artificial
  probe
  misc_feature (1)..(25): SEQ ID NO: 7848; WAN0249WH; Start 2; Stop 26
agatggattctcctttaaattttcc

SEQ ID NO: 477937 - DNA, 25 bp, Artificial
  probe
  misc_feature (1)..(25): SEQ ID NO: 7848; WAN0249WH; Start 15; Stop 39
tttaaattttccgaggtttcccctc

SEQ ID NO: 477938 - DNA, 25 bp, Artificial
  probe
  misc_feature (1)..(25): SEQ ID NO: 7848; WAN0249WH; Start 1; Stop 25
tagatggattctcctttaaattttc

SEQ ID NO: 477939 - DNA, 25 bp, Artificial
  probe
  misc_feature (1)..(25): SEQ ID NO: 7849; WAN0249LP; Start 16; Stop 40
tagtcattccctccttttgtgtttt

SEQ ID NO: 477940 - DNA, 25 bp, Artificial
  probe
  misc_feature (1)..(25): SEQ ID NO: 7849; WAN0249LP; Start 15; Stop 39
ttagtcattccctccttttgtgttt

SEQ ID NO: 477941 - DNA, 25 bp, Artificial
  probe
  misc_feature (1)..(25): SEQ ID NO: 7849; WAN0249LP; Start 14; Stop 38
gttagtcattccctccttttgtgtt

SEQ ID NO: 477942 - DNA, 25 bp, Artificial
  probe
  misc_feature (1)..(25): SEQ ID NO: 7849; WAN0249LP; Start 13; Stop 37
ggttagtcattccctccttttgtgt

SEQ ID NO: 477943 - DNA, 25 bp, Artificial
  probe
  misc_feature (1)..(25): SEQ ID NO: 7849; WAN0249LP; Start 12; Stop 36
gggttagtcattccctccttttgtg

SEQ ID NO: 477944 - DNA, 25 bp, Artificial
  probe
  misc_feature (1)..(25): SEQ ID NO: 7851; WAN0249WD; Start 1; Stop 25
tctttctccctcttatcccgtaacg

SEQ ID NO: 477945 - DNA, 25 bp, Artificial
  probe
  misc_feature (1)..(25): SEQ ID NO: 7851; WAN0249WD; Start 2; Stop 26
ctttctccctcttatcccgtaacgt

SEQ ID NO: 477946 - DNA, 25 bp, Artificial
  probe
  misc_feature (1)..(25): SEQ ID NO: 7851; WAN0249WD; Start 3; Stop 27
tttctccctcttatcccgtaacgtg

SEQ ID NO: 477947 - DNA, 25 bp, Artificial
  probe
  misc_feature (1)..(25): SEQ ID NO: 7853; WAN0249G5; Start 51; Stop 75
ccctcctttcttttgatgtttactt

SEQ ID NO: 477948 - DNA, 25 bp, Artificial
  probe
  misc_feature (1)..(25): SEQ ID NO: 7853; WAN0249G5; Start 50; Stop 74
cccctcctttcttttgatgtttact

SEQ ID NO: 477949 - DNA, 25 bp, Artificial
  probe
  misc_feature (1)..(25): SEQ ID NO: 7853; WAN0249G5; Start 52; Stop 76
cctcctttcttttgatgtttacttt

SEQ ID NO: 477950 - DNA, 25 bp, Artificial
  probe
  misc_feature (1)..(25): SEQ ID NO: 7853; WAN0249G5; Start 49; Stop 73
gcccctcctttcttttgatgtttac

SEQ ID NO: 477951 - DNA, 25 bp, Artificial
  probe
  misc_feature (1)..(25): SEQ ID NO: 7853; WAN0249G5; Start 48; Stop 72
cgcccctcctttcttttgatgttta

SEQ ID NO: 477952 - DNA, 25 bp, Artificial
  probe
  misc_feature (1)..(25): SEQ ID NO: 7853; WAN0249G5; Start 53; Stop 77
ctcctttcttttgatgtttactttt

SEQ ID NO: 477953 - DNA, 25 bp, Artificial
  probe
  misc_feature (1)..(25): SEQ ID NO: 7853; WAN0249G5; Start 44; Stop 68
ttttcgcccctcctttcttttgatg

SEQ ID NO: 477954 - DNA, 25 bp, Artificial
  probe
  misc_feature (1)..(25): SEQ ID NO: 7853; WAN0249G5; Start 47; Stop 71
tcgcccctcctttcttttgatgttt

SEQ ID NO: 477955 - DNA, 25 bp, Artificial
  probe
  misc_feature (1)..(25): SEQ ID NO: 7853; WAN0249G5; Start 46; Stop 70
ttcgcccctcctttcttttgatgtt

SEQ ID NO: 477956 - DNA, 25 bp, Artificial
  probe
  misc_feature (1)..(25): SEQ ID NO: 7853; WAN0249G5; Start 45; Stop 69
tttcgcccctcctttcttttgatgt

SEQ ID NO: 477957 - DNA, 25 bp, Artificial
  probe
  misc_feature (1)..(25): SEQ ID NO: 7855; WAN024AQP; Start 29; Stop 53
ggtcaaagatagtcaatatcagtaa

SEQ ID NO: 477958 - DNA, 25 bp, Artificial
  probe
  misc_feature (1)..(25): SEQ ID NO: 7857; WAN024BGN; Start 8; Stop 32
ttacttccgtcgcatcaatcattac

SEQ ID NO: 477959 - DNA, 25 bp, Artificial
  probe
  misc_feature (1)..(25): SEQ ID NO: 7857; WAN024BGN; Start 7; Stop 31
tttacttccgtcgcatcaatcatta

SEQ ID NO: 477960 - DNA, 25 bp, Artificial
  probe
  misc_feature (1)..(25): SEQ ID NO: 7857; WAN024BGN; Start 6; Stop 30
ttttacttccgtcgcatcaatcatt

SEQ ID NO: 477961 - DNA, 25 bp, Artificial
  probe
  misc_feature (1)..(25): SEQ ID NO: 7860; WAN024AZY; Start 39; Stop 63
ggatgaaacttcttatcgggttcta

SEQ ID NO: 477962 - DNA, 25 bp, Artificial
  probe
  misc_feature (1)..(25): SEQ ID NO: 7860; WAN024AZY; Start 40; Stop 64
gatgaaacttcttatcgggttctag

SEQ ID NO: 477963 - DNA, 25 bp, Artificial
  probe
  misc_feature (1)..(25): SEQ ID NO: 7860; WAN024AZY; Start 210; Stop 234
tgatatgttgcggcagctaactaat

SEQ ID NO: 477964 - DNA, 25 bp, Artificial
  probe
  misc_feature (1)..(25): SEQ ID NO: 7860; WAN024AZY; Start 38; Stop 62
cggatgaaacttcttatcgggttct

SEQ ID NO: 477965 - DNA, 25 bp, Artificial
  probe
  misc_feature (1)..(25): SEQ ID NO: 7860; WAN024AZY; Start 209; Stop 233
gtgatatgttgcggcagctaactaa

SEQ ID NO: 477966 - DNA, 25 bp, Artificial
  probe
  misc_feature (1)..(25): SEQ ID NO: 7860; WAN024AZY; Start 48; Stop 72
ttcttatcgggttctagagagtcat

SEQ ID NO: 477967 - DNA, 25 bp, Artificial
  probe
  misc_feature (1)..(25): SEQ ID NO: 7860; WAN024AZY; Start 42; Stop 66
tgaaacttcttatcgggttctagag

SEQ ID NO: 477968 - DNA, 25 bp, Artificial
  probe
  misc_feature (1)..(25): SEQ ID NO: 7860; WAN024AZY; Start 44; Stop 68
aaacttcttatcgggttctagagag

SEQ ID NO: 477969 - DNA, 25 bp, Artificial
  probe
  misc_feature (1)..(25): SEQ ID NO: 7860; WAN024AZY; Start 43; Stop 67
gaaacttcttatcgggttctagaga

SEQ ID NO: 477970 - DNA, 25 bp, Artificial
  probe
  misc_feature (1)..(25): SEQ ID NO: 7860; WAN024AZY; Start 41; Stop 65
atgaaacttcttatcgggttctaga

SEQ ID NO: 477971 - DNA, 25 bp, Artificial
  probe
  misc_feature (1)..(25): SEQ ID NO: 7860; WAN024AZY; Start 47; Stop 71
cttcttatcgggttctagagagtca

SEQ ID NO: 477972 - DNA, 25 bp, Artificial
  probe
  misc_feature (1)..(25): SEQ ID NO: 7860; WAN024AZY; Start 45; Stop 69
aacttcttatcgggttctagagagt

SEQ ID NO: 477973 - DNA, 25 bp, Artificial
  probe
  misc_feature (1)..(25): SEQ ID NO: 7860; WAN024AZY; Start 46; Stop 70
acttcttatcgggttctagagagtc

SEQ ID NO: 477974 - DNA, 25 bp, Artificial
  probe
  misc_feature (1)..(25): SEQ ID NO: 7860; WAN024AZY; Start 205; Stop 229
cattgtgatatgttgcggcagctaa

SEQ ID NO: 477975 - DNA, 25 bp, Artificial
  probe
  misc_feature (1)..(25): SEQ ID NO: 7860; WAN024AZY; Start 37; Stop 61
gcggatgaaacttcttatcgggttc

SEQ ID NO: 477976 - DNA, 25 bp, Artificial
  probe
  misc_feature (1)..(25): SEQ ID NO: 7860; WAN024AZY; Start 206; Stop 230
attgtgatatgttgcggcagctaac

SEQ ID NO: 477977 - DNA, 25 bp, Artificial
  probe
  misc_feature (1)..(25): SEQ ID NO: 7860; WAN024AZY; Start 208; Stop 232
tgtgatatgttgcggcagctaacta

SEQ ID NO: 477978 - DNA, 25 bp, Artificial
  probe
  misc_feature (1)..(25): SEQ ID NO: 7860; WAN024AZY; Start 35; Stop 59
atgcggatgaaacttcttatcgggt

SEQ ID NO: 477979 - DNA, 25 bp, Artificial
  probe
  misc_feature (1)..(25): SEQ ID NO: 7860; WAN024AZY; Start 34; Stop 58
catgcggatgaaacttcttatcggg

SEQ ID NO: 477980 - DNA, 25 bp, Artificial
  probe
  misc_feature (1)..(25): SEQ ID NO: 7860; WAN024AZY; Start 36; Stop 60
tgcggatgaaacttcttatcgggtt

SEQ ID NO: 477981 - DNA, 25 bp, Artificial
  probe
  misc_feature (1)..(25): SEQ ID NO: 7860; WAN024AZY; Start 33; Stop 57
tcatgcggatgaaacttcttatcgg

SEQ ID NO: 477982 - DNA, 25 bp, Artificial
  probe
  misc_feature (1)..(25): SEQ ID NO: 7860; WAN024AZY; Start 204; Stop 228
tcattgtgatatgttgcggcagcta

SEQ ID NO: 477983 - DNA, 25 bp, Artificial
  probe
  misc_feature (1)..(25): SEQ ID NO: 7860; WAN024AZY; Start 207; Stop 231
ttgtgatatgttgcggcagctaact

SEQ ID NO: 477984 - DNA, 25 bp, Artificial
  probe
  misc_feature (1)..(25): SEQ ID NO: 7860; WAN024AZY; Start 31; Stop 55
cttcatgcggatgaaacttcttatc

SEQ ID NO: 477985 - DNA, 25 bp, Artificial
  probe
  misc_feature (1)..(25): SEQ ID NO: 7860; WAN024AZY; Start 32; Stop 56
ttcatgcggatgaaacttcttatcg

SEQ ID NO: 477986 - DNA, 25 bp, Artificial
  probe
  misc_feature (1)..(25): SEQ ID NO: 7862; WAN024DRA; Start 1; Stop 25
ttgggaatttacctattaacttcgg

SEQ ID NO: 477987 - DNA, 25 bp, Artificial
  probe
  misc_feature (1)..(25): SEQ ID NO: 7862; WAN024DRA; Start 2; Stop 26
tgggaatttacctattaacttcggt

SEQ ID NO: 477988 - DNA, 25 bp, Artificial
  probe
  misc_feature (1)..(25): SEQ ID NO: 7862; WAN024DRA; Start 3; Stop 27
gggaatttacctattaacttcggta

SEQ ID NO: 477989 - DNA, 25 bp, Artificial
  probe
  misc_feature (1)..(25): SEQ ID NO: 7862; WAN024DRA; Start 4; Stop 28
ggaatttacctattaacttcggtag

SEQ ID NO: 477990 - DNA, 25 bp, Artificial
  probe
  misc_feature (1)..(25): SEQ ID NO: 7862; WAN024DRA; Start 5; Stop 29
gaatttacctattaacttcggtaga

SEQ ID NO: 477991 - DNA, 25 bp, Artificial
  probe
  misc_feature (1)..(25): SEQ ID NO: 7862; WAN024DRA; Start 8; Stop 32
tttacctattaacttcggtagattt

SEQ ID NO: 477992 - DNA, 25 bp, Artificial
  probe
  misc_feature (1)..(25): SEQ ID NO: 7862; WAN024DRA; Start 7; Stop 31
atttacctattaacttcggtagatt

SEQ ID NO: 477993 - DNA, 25 bp, Artificial
  probe
  misc_feature (1)..(25): SEQ ID NO: 7862; WAN024DRA; Start 6; Stop 30
aatttacctattaacttcggtagat

SEQ ID NO: 477994 - DNA, 25 bp, Artificial
  probe
  misc_feature (1)..(25): SEQ ID NO: 7862; WAN024DRA; Start 9; Stop 33
ttacctattaacttcggtagatttt

SEQ ID NO: 477995 - DNA, 25 bp, Artificial
  probe
  misc_feature (1)..(25): SEQ ID NO: 7863; WAN024FMB; Start 37; Stop 61
gcagatagtggaaataaaggtgtag

SEQ ID NO: 477996 - DNA, 25 bp, Artificial
  probe
  misc_feature (1)..(25): SEQ ID NO: 7863; WAN024FMB; Start 40; Stop 64
gatagtggaaataaaggtgtagaca

SEQ ID NO: 477997 - DNA, 25 bp, Artificial
  probe
  misc_feature (1)..(25): SEQ ID NO: 7863; WAN024FMB; Start 39; Stop 63
agatagtggaaataaaggtgtagac

SEQ ID NO: 477998 - DNA, 25 bp, Artificial
  probe
  misc_feature (1)..(25): SEQ ID NO: 7863; WAN024FMB; Start 38; Stop 62
cagatagtggaaataaaggtgtaga

SEQ ID NO: 477999 - DNA, 25 bp, Artificial
  probe
  misc_feature (1)..(25): SEQ ID NO: 7863; WAN024FMB; Start 44; Stop 68
gtggaaataaaggtgtagacattac

SEQ ID NO: 478000 - DNA, 25 bp, Artificial
  probe
  misc_feature (1)..(25): SEQ ID NO: 7863; WAN024FMB; Start 43; Stop 67
agtggaaataaaggtgtagacatta

SEQ ID NO: 478001 - DNA, 25 bp, Artificial
  probe
  misc_feature (1)..(25): SEQ ID NO: 7863; WAN024FMB; Start 42; Stop 66
tagtggaaataaaggtgtagacatt

SEQ ID NO: 478002 - DNA, 25 bp, Artificial
  probe
  misc_feature (1)..(25): SEQ ID NO: 7863; WAN024FMB; Start 46; Stop 70
ggaaataaaggtgtagacattaccg

SEQ ID NO: 478003 - DNA, 25 bp, Artificial
  probe
  misc_feature (1)..(25): SEQ ID NO: 7863; WAN024FMB; Start 41; Stop 65
atagtggaaataaaggtgtagacat

SEQ ID NO: 478004 - DNA, 25 bp, Artificial
  probe
  misc_feature (1)..(25): SEQ ID NO: 7863; WAN024FMB; Start 35; Stop 59
atgcagatagtggaaataaaggtgt

SEQ ID NO: 478005 - DNA, 25 bp, Artificial
  probe
  misc_feature (1)..(25): SEQ ID NO: 7863; WAN024FMB; Start 34; Stop 58
gatgcagatagtggaaataaaggtg

SEQ ID NO: 478006 - DNA, 25 bp, Artificial
  probe
  misc_feature (1)..(25): SEQ ID NO: 7863; WAN024FMB; Start 36; Stop 60
tgcagatagtggaaataaaggtgta

SEQ ID NO: 478007 - DNA, 25 bp, Artificial
  probe
  misc_feature (1)..(25): SEQ ID NO: 7863; WAN024FMB; Start 33; Stop 57
agatgcagatagtggaaataaaggt

SEQ ID NO: 478008 - DNA, 25 bp, Artificial
  probe
  misc_feature (1)..(25): SEQ ID NO: 7863; WAN024FMB; Start 47; Stop 71
gaaataaaggtgtagacattaccgt

SEQ ID NO: 478009 - DNA, 25 bp, Artificial
  probe
  misc_feature (1)..(25): SEQ ID NO: 7863; WAN024FMB; Start 32; Stop 56
aagatgcagatagtggaaataaagg

SEQ ID NO: 478010 - DNA, 25 bp, Artificial
  probe
  misc_feature (1)..(25): SEQ ID NO: 7863; WAN024FMB; Start 45; Stop 69
tggaaataaaggtgtagacattacc

SEQ ID NO: 478011 - DNA, 25 bp, Artificial
  probe
  misc_feature (1)..(25): SEQ ID NO: 7863; WAN024FMB; Start 27; Stop 51
acttaaagatgcagatagtggaaat

SEQ ID NO: 478012 - DNA, 25 bp, Artificial
  probe
  misc_feature (1)..(25): SEQ ID NO: 7863; WAN024FMB; Start 24; Stop 48
gatacttaaagatgcagatagtgga

SEQ ID NO: 478013 - DNA, 25 bp, Artificial
  probe
  misc_feature (1)..(25): SEQ ID NO: 7863; WAN024FMB; Start 23; Stop 47
agatacttaaagatgcagatagtgg

SEQ ID NO: 478014 - DNA, 25 bp, Artificial
  probe
  misc_feature (1)..(25): SEQ ID NO: 7863; WAN024FMB; Start 31; Stop 55
aaagatgcagatagtggaaataaag

SEQ ID NO: 478015 - DNA, 25 bp, Artificial
  probe
  misc_feature (1)..(25): SEQ ID NO: 7863; WAN024FMB; Start 26; Stop 50
tacttaaagatgcagatagtggaaa

SEQ ID NO: 478016 - DNA, 25 bp, Artificial
  probe
  misc_feature (1)..(25): SEQ ID NO: 7863; WAN024FMB; Start 25; Stop 49
atacttaaagatgcagatagtggaa

SEQ ID NO: 478017 - DNA, 25 bp, Artificial
  probe
  misc_feature (1)..(25): SEQ ID NO: 7863; WAN024FMB; Start 28; Stop 52
cttaaagatgcagatagtggaaata

SEQ ID NO: 478018 - DNA, 25 bp, Artificial
  probe
  misc_feature (1)..(25): SEQ ID NO: 7863; WAN024FMB; Start 30; Stop 54
taaagatgcagatagtggaaataaa

SEQ ID NO: 478019 - DNA, 25 bp, Artificial
  probe
  misc_feature (1)..(25): SEQ ID NO: 7863; WAN024FMB; Start 29; Stop 53
ttaaagatgcagatagtggaaataa

SEQ ID NO: 478020 - DNA, 25 bp, Artificial
  probe
  misc_feature (1)..(25): SEQ ID NO: 7863; WAN024FMB; Start 22; Stop 46
aagatacttaaagatgcagatagtg

SEQ ID NO: 478021 - DNA, 25 bp, Artificial
  probe
  misc_feature (1)..(25): SEQ ID NO: 7863; WAN024FMB; Start 4; Stop 28
gttcgcgggaagtctactaagatac

SEQ ID NO: 478022 - DNA, 25 bp, Artificial
  probe
  misc_feature (1)..(25): SEQ ID NO: 7863; WAN024FMB; Start 3; Stop 27
ggttcgcgggaagtctactaagata

SEQ ID NO: 478023 - DNA, 25 bp, Artificial
  probe
  misc_feature (1)..(25): SEQ ID NO: 7863; WAN024FMB; Start 2; Stop 26
tggttcgcgggaagtctactaagat

SEQ ID NO: 478024 - DNA, 25 bp, Artificial
  probe
  misc_feature (1)..(25): SEQ ID NO: 7867; WAN0249G4; Start 8; Stop 32
aagtaaacatcaaaagaaaggaggg

SEQ ID NO: 478025 - DNA, 25 bp, Artificial
  probe
  misc_feature (1)..(25): SEQ ID NO: 7867; WAN0249G4; Start 9; Stop 33
agtaaacatcaaaagaaaggagggg

SEQ ID NO: 478026 - DNA, 25 bp, Artificial
  probe
  misc_feature (1)..(25): SEQ ID NO: 7867; WAN0249G4; Start 7; Stop 31
aaagtaaacatcaaaagaaaggagg

SEQ ID NO: 478027 - DNA, 25 bp, Artificial
  probe
  misc_feature (1)..(25): SEQ ID NO: 7867; WAN0249G4; Start 10; Stop 34
gtaaacatcaaaagaaaggaggggc

SEQ ID NO: 478028 - DNA, 25 bp, Artificial
  probe
  misc_feature (1)..(25): SEQ ID NO: 7867; WAN0249G4; Start 11; Stop 35
taaacatcaaaagaaaggaggggcg

SEQ ID NO: 478029 - DNA, 25 bp, Artificial
  probe
  misc_feature (1)..(25): SEQ ID NO: 7867; WAN0249G4; Start 6; Stop 30
aaaagtaaacatcaaaagaaaggag

SEQ ID NO: 478030 - DNA, 25 bp, Artificial
  probe
  misc_feature (1)..(25): SEQ ID NO: 7867; WAN0249G4; Start 15; Stop 39
catcaaaagaaaggaggggcgaaaa

SEQ ID NO: 478031 - DNA, 25 bp, Artificial
  probe
  misc_feature (1)..(25): SEQ ID NO: 7867; WAN0249G4; Start 14; Stop 38
acatcaaaagaaaggaggggcgaaa

SEQ ID NO: 478032 - DNA, 25 bp, Artificial
  probe
  misc_feature (1)..(25): SEQ ID NO: 7867; WAN0249G4; Start 13; Stop 37
aacatcaaaagaaaggaggggcgaa

SEQ ID NO: 478033 - DNA, 25 bp, Artificial
  probe
  misc_feature (1)..(25): SEQ ID NO: 7867; WAN0249G4; Start 12; Stop 36
aaacatcaaaagaaaggaggggcga

SEQ ID NO: 478034 - DNA, 25 bp, Artificial
  probe
  misc_feature (1)..(25): SEQ ID NO: 7871; WAN02496E; Start 18; Stop 42
cgaggtttattttcaaaactttcga

SEQ ID NO: 478035 - DNA, 25 bp, Artificial
  probe
  misc_feature (1)..(25): SEQ ID NO: 7871; WAN02496E; Start 17; Stop 41
tcgaggtttattttcaaaactttcg

SEQ ID NO: 478036 - DNA, 25 bp, Artificial
  probe
  misc_feature (1)..(25): SEQ ID NO: 7871; WAN02496E; Start 19; Stop 43
gaggtttattttcaaaactttcgat

SEQ ID NO: 478037 - DNA, 25 bp, Artificial
  probe
  misc_feature (1)..(25): SEQ ID NO: 7871; WAN02496E; Start 16; Stop 40
atcgaggtttattttcaaaactttc

SEQ ID NO: 478038 - DNA, 25 bp, Artificial
  probe
  misc_feature (1)..(25): SEQ ID NO: 7871; WAN02496E; Start 20; Stop 44
aggtttattttcaaaactttcgata

SEQ ID NO: 478039 - DNA, 25 bp, Artificial
  probe
  misc_feature (1)..(25): SEQ ID NO: 7871; WAN02496E; Start 15; Stop 39
tatcgaggtttattttcaaaacttt

SEQ ID NO: 478040 - DNA, 25 bp, Artificial
  probe
  misc_feature (1)..(25): SEQ ID NO: 7871; WAN02496E; Start 14; Stop 38
atatcgaggtttattttcaaaactt

SEQ ID NO: 478041 - DNA, 25 bp, Artificial
  probe
  misc_feature (1)..(25): SEQ ID NO: 7871; WAN02496E; Start 13; Stop 37
aatatcgaggtttattttcaaaact

SEQ ID NO: 478042 - DNA, 25 bp, Artificial
  probe
  misc_feature (1)..(25): SEQ ID NO: 7871; WAN02496E; Start 21; Stop 45
ggtttattttcaaaactttcgatat

SEQ ID NO: 478043 - DNA, 25 bp, Artificial
  probe
  misc_feature (1)..(25): SEQ ID NO: 7871; WAN02496E; Start 12; Stop 36
aaatatcgaggtttattttcaaaac

SEQ ID NO: 478044 - DNA, 25 bp, Artificial
  probe
  misc_feature (1)..(25): SEQ ID NO: 7872; WAN02498S; Start 23; Stop 47
cgaaagttttgaaaataaacctcga

SEQ ID NO: 478045 - DNA, 25 bp, Artificial
  probe
  misc_feature (1)..(25): SEQ ID NO: 7872; WAN02498S; Start 22; Stop 46
tcgaaagttttgaaaataaacctcg

SEQ ID NO: 478046 - DNA, 25 bp, Artificial
  probe
  misc_feature (1)..(25): SEQ ID NO: 7872; WAN02498S; Start 24; Stop 48
gaaagttttgaaaataaacctcgat

SEQ ID NO: 478047 - DNA, 25 bp, Artificial
  probe
  misc_feature (1)..(25): SEQ ID NO: 7872; WAN02498S; Start 21; Stop 45
atcgaaagttttgaaaataaacctc

SEQ ID NO: 478048 - DNA, 25 bp, Artificial
  probe
  misc_feature (1)..(25): SEQ ID NO: 7872; WAN02498S; Start 25; Stop 49
aaagttttgaaaataaacctcgata

SEQ ID NO: 478049 - DNA, 25 bp, Artificial
  probe
  misc_feature (1)..(25): SEQ ID NO: 7872; WAN02498S; Start 20; Stop 44
tatcgaaagttttgaaaataaacct

SEQ ID NO: 478050 - DNA, 25 bp, Artificial
  probe
  misc_feature (1)..(25): SEQ ID NO: 7872; WAN02498S; Start 27; Stop 51
agttttgaaaataaacctcgatatt

SEQ ID NO: 478051 - DNA, 25 bp, Artificial
  probe
  misc_feature (1)..(25): SEQ ID NO: 7872; WAN02498S; Start 26; Stop 50
aagttttgaaaataaacctcgatat

SEQ ID NO: 478052 - DNA, 25 bp, Artificial
  probe
  misc_feature (1)..(25): SEQ ID NO: 7872; WAN02498S; Start 28; Stop 52
gttttgaaaataaacctcgatattt

SEQ ID NO: 478053 - DNA, 25 bp, Artificial
  probe
  misc_feature (1)..(25): SEQ ID NO: 7872; WAN02498S; Start 19; Stop 43
atatcgaaagttttgaaaataaacc

SEQ ID NO: 478054 - DNA, 25 bp, Artificial
  probe
  misc_feature (1)..(25): SEQ ID NO: 7875; WAN024BJB; Start 51; Stop 75
aatggaagacttctttgctctaact

SEQ ID NO: 478055 - DNA, 25 bp, Artificial
  probe
  misc_feature (1)..(25): SEQ ID NO: 7875; WAN024BJB; Start 53; Stop 77
tggaagacttctttgctctaactaa

SEQ ID NO: 478056 - DNA, 25 bp, Artificial
  probe
  misc_feature (1)..(25): SEQ ID NO: 7875; WAN024BJB; Start 52; Stop 76
atggaagacttctttgctctaacta

SEQ ID NO: 478057 - DNA, 25 bp, Artificial
  probe
  misc_feature (1)..(25): SEQ ID NO: 7875; WAN024BJB; Start 47; Stop 71
ccttaatggaagacttctttgctct

SEQ ID NO: 478058 - DNA, 25 bp, Artificial
  probe
  misc_feature (1)..(25): SEQ ID NO: 7875; WAN024BJB; Start 50; Stop 74
taatggaagacttctttgctctaac

SEQ ID NO: 478059 - DNA, 25 bp, Artificial
  probe
  misc_feature (1)..(25): SEQ ID NO: 7875; WAN024BJB; Start 48; Stop 72
cttaatggaagacttctttgctcta

SEQ ID NO: 478060 - DNA, 25 bp, Artificial
  probe
  misc_feature (1)..(25): SEQ ID NO: 7875; WAN024BJB; Start 54; Stop 78
ggaagacttctttgctctaactaat

SEQ ID NO: 478061 - DNA, 25 bp, Artificial
  probe
  misc_feature (1)..(25): SEQ ID NO: 7875; WAN024BJB; Start 46; Stop 70
cccttaatggaagacttctttgctc

SEQ ID NO: 478062 - DNA, 25 bp, Artificial
  probe
  misc_feature (1)..(25): SEQ ID NO: 7875; WAN024BJB; Start 49; Stop 73
ttaatggaagacttctttgctctaa

SEQ ID NO: 478063 - DNA, 25 bp, Artificial
  probe
  misc_feature (1)..(25): SEQ ID NO: 7877; WAN024BIA; Start 30; Stop 54
ttttgtagataatcccaggaaaatt

SEQ ID NO: 478064 - DNA, 25 bp, Artificial
  probe
  misc_feature (1)..(25): SEQ ID NO: 7877; WAN024BIA; Start 31; Stop 55
tttgtagataatcccaggaaaatta

SEQ ID NO: 478065 - DNA, 25 bp, Artificial
  probe
  misc_feature (1)..(25): SEQ ID NO: 7877; WAN024BIA; Start 42; Stop 66
tcccaggaaaattataatggatcaa

SEQ ID NO: 478066 - DNA, 25 bp, Artificial
  probe
  misc_feature (1)..(25): SEQ ID NO: 7877; WAN024BIA; Start 43; Stop 67
cccaggaaaattataatggatcaat

SEQ ID NO: 478067 - DNA, 25 bp, Artificial
  probe
  misc_feature (1)..(25): SEQ ID NO: 7877; WAN024BIA; Start 32; Stop 56
ttgtagataatcccaggaaaattat

SEQ ID NO: 478068 - DNA, 25 bp, Artificial
  probe
  misc_feature (1)..(25): SEQ ID NO: 7877; WAN024BIA; Start 41; Stop 65
atcccaggaaaattataatggatca

SEQ ID NO: 478069 - DNA, 25 bp, Artificial
  probe
  misc_feature (1)..(25): SEQ ID NO: 7877; WAN024BIA; Start 40; Stop 64
aatcccaggaaaattataatggatc

SEQ ID NO: 478070 - DNA, 25 bp, Artificial
  probe
  misc_feature (1)..(25): SEQ ID NO: 7877; WAN024BIA; Start 44; Stop 68
ccaggaaaattataatggatcaatt

SEQ ID NO: 478071 - DNA, 25 bp, Artificial
  probe
  misc_feature (1)..(25): SEQ ID NO: 7877; WAN024BIA; Start 38; Stop 62
ataatcccaggaaaattataatgga

SEQ ID NO: 478072 - DNA, 25 bp, Artificial
  probe
  misc_feature (1)..(25): SEQ ID NO: 7877; WAN024BIA; Start 37; Stop 61
gataatcccaggaaaattataatgg

SEQ ID NO: 478073 - DNA, 25 bp, Artificial
  probe
  misc_feature (1)..(25): SEQ ID NO: 7877; WAN024BIA; Start 39; Stop 63
taatcccaggaaaattataatggat

SEQ ID NO: 478074 - DNA, 25 bp, Artificial
  probe
  misc_feature (1)..(25): SEQ ID NO: 7878; WAN024B9Q; Start 3; Stop 27
tacttcgtcagtcttatctacaacc

SEQ ID NO: 478075 - DNA, 25 bp, Artificial
  probe
  misc_feature (1)..(25): SEQ ID NO: 7878; WAN024B9Q; Start 1; Stop 25
actacttcgtcagtcttatctacaa

SEQ ID NO: 478076 - DNA, 25 bp, Artificial
  probe
  misc_feature (1)..(25): SEQ ID NO: 7878; WAN024B9Q; Start 2; Stop 26
ctacttcgtcagtcttatctacaac

SEQ ID NO: 478077 - DNA, 25 bp, Artificial
  probe
  misc_feature (1)..(25): SEQ ID NO: 7879; WAN024BB4; Start 83; Stop 107
tcagtcacatatataatccaaggct

SEQ ID NO: 478078 - DNA, 25 bp, Artificial
  probe
  misc_feature (1)..(25): SEQ ID NO: 7879; WAN024BB4; Start 84; Stop 108
cagtcacatatataatccaaggcta

SEQ ID NO: 478079 - DNA, 25 bp, Artificial
  probe
  misc_feature (1)..(25): SEQ ID NO: 7879; WAN024BB4; Start 49; Stop 73
tactgctttgaggttgtagatagaa

SEQ ID NO: 478080 - DNA, 25 bp, Artificial
  probe
  misc_feature (1)..(25): SEQ ID NO: 7879; WAN024BB4; Start 48; Stop 72
gtactgctttgaggttgtagataga

SEQ ID NO: 478081 - DNA, 25 bp, Artificial
  probe
  misc_feature (1)..(25): SEQ ID NO: 7879; WAN024BB4; Start 86; Stop 110
gtcacatatataatccaaggctaac

SEQ ID NO: 478082 - DNA, 25 bp, Artificial
  probe
  misc_feature (1)..(25): SEQ ID NO: 7879; WAN024BB4; Start 87; Stop 111
tcacatatataatccaaggctaact

SEQ ID NO: 478083 - DNA, 25 bp, Artificial
  probe
  misc_feature (1)..(25): SEQ ID NO: 7879; WAN024BB4; Start 85; Stop 109
agtcacatatataatccaaggctaa

SEQ ID NO: 478084 - DNA, 25 bp, Artificial
  probe
  misc_feature (1)..(25): SEQ ID NO: 7879; WAN024BB4; Start 88; Stop 112
cacatatataatccaaggctaacta

SEQ ID NO: 478085 - DNA, 25 bp, Artificial
  probe
  misc_feature (1)..(25): SEQ ID NO: 7879; WAN024BB4; Start 47; Stop 71
agtactgctttgaggttgtagatag

SEQ ID NO: 478086 - DNA, 25 bp, Artificial
  probe
  misc_feature (1)..(25): SEQ ID NO: 7879; WAN024BB4; Start 46; Stop 70
aagtactgctttgaggttgtagata

SEQ ID NO: 478087 - DNA, 25 bp, Artificial
  probe
  misc_feature (1)..(25): SEQ ID NO: 7879; WAN024BB4; Start 89; Stop 113
acatatataatccaaggctaactaa

SEQ ID NO: 478088 - DNA, 25 bp, Artificial
  probe
  misc_feature (1)..(25): SEQ ID NO: 7879; WAN024BB4; Start 45; Stop 69
aaagtactgctttgaggttgtagat

SEQ ID NO: 478089 - DNA, 25 bp, Artificial
  probe
  misc_feature (1)..(25): SEQ ID NO: 7879; WAN024BB4; Start 3; Stop 27
gaaaatcaaagagcaaactagaaaa

SEQ ID NO: 478090 - DNA, 25 bp, Artificial
  probe
  misc_feature (1)..(25): SEQ ID NO: 7879; WAN024BB4; Start 26; Stop 50
aactagtcgcaggttgctcaaagta

SEQ ID NO: 478091 - DNA, 25 bp, Artificial
  probe
  misc_feature (1)..(25): SEQ ID NO: 7879; WAN024BB4; Start 27; Stop 51
actagtcgcaggttgctcaaagtac

SEQ ID NO: 478092 - DNA, 25 bp, Artificial
  probe
  misc_feature (1)..(25): SEQ ID NO: 7879; WAN024BB4; Start 20; Stop 44
ctagaaaactagtcgcaggttgctc

SEQ ID NO: 478093 - DNA, 25 bp, Artificial
  probe
  misc_feature (1)..(25): SEQ ID NO: 7879; WAN024BB4; Start 25; Stop 49
aaactagtcgcaggttgctcaaagt

SEQ ID NO: 478094 - DNA, 25 bp, Artificial
  probe
  misc_feature (1)..(25): SEQ ID NO: 7879; WAN024BB4; Start 10; Stop 34
aaagagcaaactagaaaactagtcg

SEQ ID NO: 478095 - DNA, 25 bp, Artificial
  probe
  misc_feature (1)..(25): SEQ ID NO: 7879; WAN024BB4; Start 17; Stop 41
aaactagaaaactagtcgcaggttg

SEQ ID NO: 478096 - DNA, 25 bp, Artificial
  probe
  misc_feature (1)..(25): SEQ ID NO: 7879; WAN024BB4; Start 16; Stop 40
caaactagaaaactagtcgcaggtt

SEQ ID NO: 478097 - DNA, 25 bp, Artificial
  probe
  misc_feature (1)..(25): SEQ ID NO: 7879; WAN024BB4; Start 11; Stop 35
aagagcaaactagaaaactagtcgc

SEQ ID NO: 478098 - DNA, 25 bp, Artificial
  probe
  misc_feature (1)..(25): SEQ ID NO: 7879; WAN024BB4; Start 24; Stop 48
aaaactagtcgcaggttgctcaaag

SEQ ID NO: 478099 - DNA, 25 bp, Artificial
  probe
  misc_feature (1)..(25): SEQ ID NO: 7879; WAN024BB4; Start 23; Stop 47
gaaaactagtcgcaggttgctcaaa

SEQ ID NO: 478100 - DNA, 25 bp, Artificial
  probe
  misc_feature (1)..(25): SEQ ID NO: 7879; WAN024BB4; Start 21; Stop 45
tagaaaactagtcgcaggttgctca

SEQ ID NO: 478101 - DNA, 25 bp, Artificial
  probe
  misc_feature (1)..(25): SEQ ID NO: 7879; WAN024BB4; Start 8; Stop 32
tcaaagagcaaactagaaaactagt

SEQ ID NO: 478102 - DNA, 25 bp, Artificial
  probe
  misc_feature (1)..(25): SEQ ID NO: 7879; WAN024BB4; Start 9; Stop 33
caaagagcaaactagaaaactagtc

SEQ ID NO: 478103 - DNA, 25 bp, Artificial
  probe
  misc_feature (1)..(25): SEQ ID NO: 7879; WAN024BB4; Start 13; Stop 37
gagcaaactagaaaactagtcgcag

SEQ ID NO: 478104 - DNA, 25 bp, Artificial
  probe
  misc_feature (1)..(25): SEQ ID NO: 7879; WAN024BB4; Start 12; Stop 36
agagcaaactagaaaactagtcgca

SEQ ID NO: 478105 - DNA, 25 bp, Artificial
  probe
  misc_feature (1)..(25): SEQ ID NO: 7879; WAN024BB4; Start 22; Stop 46
agaaaactagtcgcaggttgctcaa

SEQ ID NO: 478106 - DNA, 25 bp, Artificial
  probe
  misc_feature (1)..(25): SEQ ID NO: 7879; WAN024BB4; Start 14; Stop 38
agcaaactagaaaactagtcgcagg

SEQ ID NO: 478107 - DNA, 25 bp, Artificial
  probe
  misc_feature (1)..(25): SEQ ID NO: 7879; WAN024BB4; Start 18; Stop 42
aactagaaaactagtcgcaggttgc

SEQ ID NO: 478108 - DNA, 25 bp, Artificial
  probe
  misc_feature (1)..(25): SEQ ID NO: 7879; WAN024BB4; Start 15; Stop 39
gcaaactagaaaactagtcgcaggt

SEQ ID NO: 478109 - DNA, 25 bp, Artificial
  probe
  misc_feature (1)..(25): SEQ ID NO: 7879; WAN024BB4; Start 19; Stop 43
actagaaaactagtcgcaggttgct

SEQ ID NO: 478110 - DNA, 25 bp, Artificial
  probe
  misc_feature (1)..(25): SEQ ID NO: 7880; WAN024BCV; Start 45; Stop 69
aaaacactgctttgaagagattttc

SEQ ID NO: 478111 - DNA, 25 bp, Artificial
  probe
  misc_feature (1)..(25): SEQ ID NO: 7880; WAN024BCV; Start 44; Stop 68
caaaacactgctttgaagagatttt

SEQ ID NO: 478112 - DNA, 25 bp, Artificial
  probe
  misc_feature (1)..(25): SEQ ID NO: 7880; WAN024BCV; Start 46; Stop 70
aaacactgctttgaagagattttca

SEQ ID NO: 478113 - DNA, 25 bp, Artificial
  probe
  misc_feature (1)..(25): SEQ ID NO: 7880; WAN024BCV; Start 33; Stop 57
catagatagctcaaaacactgcttt

SEQ ID NO: 478114 - DNA, 25 bp, Artificial
  probe
  misc_feature (1)..(25): SEQ ID NO: 7880; WAN024BCV; Start 34; Stop 58
atagatagctcaaaacactgctttg

SEQ ID NO: 478115 - DNA, 25 bp, Artificial
  probe
  misc_feature (1)..(25): SEQ ID NO: 7880; WAN024BCV; Start 32; Stop 56
ccatagatagctcaaaacactgctt

SEQ ID NO: 478116 - DNA, 25 bp, Artificial
  probe
  misc_feature (1)..(25): SEQ ID NO: 7880; WAN024BCV; Start 31; Stop 55
gccatagatagctcaaaacactgct

SEQ ID NO: 478117 - DNA, 25 bp, Artificial
  probe
  misc_feature (1)..(25): SEQ ID NO: 7880; WAN024BCV; Start 30; Stop 54
agccatagatagctcaaaacactgc

SEQ ID NO: 478118 - DNA, 25 bp, Artificial
  probe
  misc_feature (1)..(25): SEQ ID NO: 7880; WAN024BCV; Start 47; Stop 71
aacactgctttgaagagattttcaa

SEQ ID NO: 478119 - DNA, 25 bp, Artificial
  probe
  misc_feature (1)..(25): SEQ ID NO: 7880; WAN024BCV; Start 43; Stop 67
tcaaaacactgctttgaagagattt

SEQ ID NO: 478120 - DNA, 25 bp, Artificial
  probe
  misc_feature (1)..(25): SEQ ID NO: 7880; WAN024BCV; Start 35; Stop 59
tagatagctcaaaacactgctttga

SEQ ID NO: 478121 - DNA, 25 bp, Artificial
  probe
  misc_feature (1)..(25): SEQ ID NO: 7880; WAN024BCV; Start 37; Stop 61
gatagctcaaaacactgctttgaag

SEQ ID NO: 478122 - DNA, 25 bp, Artificial
  probe
  misc_feature (1)..(25): SEQ ID NO: 7880; WAN024BCV; Start 38; Stop 62
atagctcaaaacactgctttgaaga

SEQ ID NO: 478123 - DNA, 25 bp, Artificial
  probe
  misc_feature (1)..(25): SEQ ID NO: 7880; WAN024BCV; Start 36; Stop 60
agatagctcaaaacactgctttgaa

SEQ ID NO: 478124 - DNA, 25 bp, Artificial
  probe
  misc_feature (1)..(25): SEQ ID NO: 7880; WAN024BCV; Start 39; Stop 63
tagctcaaaacactgctttgaagag

SEQ ID NO: 478125 - DNA, 25 bp, Artificial
  probe
  misc_feature (1)..(25): SEQ ID NO: 7880; WAN024BCV; Start 41; Stop 65
gctcaaaacactgctttgaagagat

SEQ ID NO: 478126 - DNA, 25 bp, Artificial
  probe
  misc_feature (1)..(25): SEQ ID NO: 7880; WAN024BCV; Start 40; Stop 64
agctcaaaacactgctttgaagaga

SEQ ID NO: 478127 - DNA, 25 bp, Artificial
  probe
  misc_feature (1)..(25): SEQ ID NO: 7881; WAN024BCY; Start 71; Stop 95
aagagtacaagaagtttagttatct

SEQ ID NO: 478128 - DNA, 25 bp, Artificial
  probe
  misc_feature (1)..(25): SEQ ID NO: 7882; WAN024BG7; Start 75; Stop 99
aactgagaggagttctctaactaat

SEQ ID NO: 478129 - DNA, 25 bp, Artificial
  probe
  misc_feature (1)..(25): SEQ ID NO: 7884; WAN024B3Q; Start 70; Stop 94
tataaacgccttcaaatcgttctat

SEQ ID NO: 478130 - DNA, 25 bp, Artificial
  probe
  misc_feature (1)..(25): SEQ ID NO: 7885; WAN024AYL; Start 3; Stop 27
gaagcaacttaaaattctttcagat

SEQ ID NO: 478131 - DNA, 25 bp, Artificial
  probe
  misc_feature (1)..(25): SEQ ID NO: 7885; WAN024AYL; Start 2; Stop 26
tgaagcaacttaaaattctttcaga

SEQ ID NO: 478132 - DNA, 25 bp, Artificial
  probe
  misc_feature (1)..(25): SEQ ID NO: 7885; WAN024AYL; Start 5; Stop 29
agcaacttaaaattctttcagataa

SEQ ID NO: 478133 - DNA, 25 bp, Artificial
  probe
  misc_feature (1)..(25): SEQ ID NO: 7885; WAN024AYL; Start 4; Stop 28
aagcaacttaaaattctttcagata

SEQ ID NO: 478134 - DNA, 25 bp, Artificial
  probe
  misc_feature (1)..(25): SEQ ID NO: 7885; WAN024AYL; Start 1; Stop 25
atgaagcaacttaaaattctttcag

SEQ ID NO: 478135 - DNA, 25 bp, Artificial
  probe
  misc_feature (1)..(25): SEQ ID NO: 7886; WAN024AYM; Start 77; Stop 101
ttggtgtgataattccactaactaa

SEQ ID NO: 478136 - DNA, 25 bp, Artificial
  probe
  misc_feature (1)..(25): SEQ ID NO: 7886; WAN024AYM; Start 78; Stop 102
tggtgtgataattccactaactaat

SEQ ID NO: 478137 - DNA, 25 bp, Artificial
  probe
  misc_feature (1)..(25): SEQ ID NO: 7886; WAN024AYM; Start 72; Stop 96
aggatttggtgtgataattccacta

SEQ ID NO: 478138 - DNA, 25 bp, Artificial
  probe
  misc_feature (1)..(25): SEQ ID NO: 7886; WAN024AYM; Start 73; Stop 97
ggatttggtgtgataattccactaa

SEQ ID NO: 478139 - DNA, 25 bp, Artificial
  probe
  misc_feature (1)..(25): SEQ ID NO: 7886; WAN024AYM; Start 71; Stop 95
caggatttggtgtgataattccact

SEQ ID NO: 478140 - DNA, 25 bp, Artificial
  probe
  misc_feature (1)..(25): SEQ ID NO: 7886; WAN024AYM; Start 75; Stop 99
atttggtgtgataattccactaact

SEQ ID NO: 478141 - DNA, 25 bp, Artificial
  probe
  misc_feature (1)..(25): SEQ ID NO: 7886; WAN024AYM; Start 74; Stop 98
gatttggtgtgataattccactaac

SEQ ID NO: 478142 - DNA, 25 bp, Artificial
  probe
  misc_feature (1)..(25): SEQ ID NO: 7886; WAN024AYM; Start 70; Stop 94
ccaggatttggtgtgataattccac

SEQ ID NO: 478143 - DNA, 25 bp, Artificial
  probe
  misc_feature (1)..(25): SEQ ID NO: 7886; WAN024AYM; Start 76; Stop 100
tttggtgtgataattccactaacta

SEQ ID NO: 478144 - DNA, 25 bp, Artificial
  probe
  misc_feature (1)..(25): SEQ ID NO: 7887; WAN024AYK; Start 70; Stop 94
ccaggatttggtgtgataattccat

SEQ ID NO: 478145 - DNA, 25 bp, Artificial
  probe
  misc_feature (1)..(25): SEQ ID NO: 7887; WAN024AYK; Start 72; Stop 96
aggatttggtgtgataattccatga

SEQ ID NO: 478146 - DNA, 25 bp, Artificial
  probe
  misc_feature (1)..(25): SEQ ID NO: 7887; WAN024AYK; Start 71; Stop 95
caggatttggtgtgataattccatg

SEQ ID NO: 478147 - DNA, 25 bp, Artificial
  probe
  misc_feature (1)..(25): SEQ ID NO: 7890; WAN024BCG; Start 37; Stop 61
aaacagtgttttgagaaacctgcgg

SEQ ID NO: 478148 - DNA, 25 bp, Artificial
  probe
  misc_feature (1)..(25): SEQ ID NO: 7890; WAN024BCG; Start 36; Stop 60
aaaacagtgttttgagaaacctgcg

SEQ ID NO: 478149 - DNA, 25 bp, Artificial
  probe
  misc_feature (1)..(25): SEQ ID NO: 7891; WAN024B93; Start 2; Stop 26
tgcctttgatggagaataatactct

SEQ ID NO: 478150 - DNA, 25 bp, Artificial
  probe
  misc_feature (1)..(25): SEQ ID NO: 7891; WAN024B93; Start 1; Stop 25
atgcctttgatggagaataatactc

SEQ ID NO: 478151 - DNA, 25 bp, Artificial
  probe
  misc_feature (1)..(25): SEQ ID NO: 7891; WAN024B93; Start 3; Stop 27
gcctttgatggagaataatactctt

SEQ ID NO: 478152 - DNA, 25 bp, Artificial
  probe
  misc_feature (1)..(25): SEQ ID NO: 7891; WAN024B93; Start 4; Stop 28
cctttgatggagaataatactcttc

SEQ ID NO: 478153 - DNA, 25 bp, Artificial
  probe
  misc_feature (1)..(25): SEQ ID NO: 7891; WAN024B93; Start 5; Stop 29
ctttgatggagaataatactcttca

SEQ ID NO: 478154 - DNA, 25 bp, Artificial
  probe
  misc_feature (1)..(25): SEQ ID NO: 7891; WAN024B93; Start 7; Stop 31
ttgatggagaataatactcttcaaa

SEQ ID NO: 478155 - DNA, 25 bp, Artificial
  probe
  misc_feature (1)..(25): SEQ ID NO: 7891; WAN024B93; Start 6; Stop 30
tttgatggagaataatactcttcaa

SEQ ID NO: 478156 - DNA, 25 bp, Artificial
  probe
  misc_feature (1)..(25): SEQ ID NO: 7891; WAN024B93; Start 8; Stop 32
tgatggagaataatactcttcaaaa

SEQ ID NO: 478157 - DNA, 25 bp, Artificial
  probe
  misc_feature (1)..(25): SEQ ID NO: 7892; WAN024AYY; Start 311; Stop 335
atagtagacaccatatccgattcca

SEQ ID NO: 478158 - DNA, 25 bp, Artificial
  probe
  misc_feature (1)..(25): SEQ ID NO: 7892; WAN024AYY; Start 312; Stop 336
tagtagacaccatatccgattccaa

SEQ ID NO: 478159 - DNA, 25 bp, Artificial
  probe
  misc_feature (1)..(25): SEQ ID NO: 7892; WAN024AYY; Start 151; Stop 175
aagattcataccttggaagaagtca

SEQ ID NO: 478160 - DNA, 25 bp, Artificial
  probe
  misc_feature (1)..(25): SEQ ID NO: 7892; WAN024AYY; Start 100; Stop 124
agactcaatcagacactacaatctc

SEQ ID NO: 478161 - DNA, 25 bp, Artificial
  probe
  misc_feature (1)..(25): SEQ ID NO: 7892; WAN024AYY; Start 99; Stop 123
aagactcaatcagacactacaatct

SEQ ID NO: 478162 - DNA, 25 bp, Artificial
  probe
  misc_feature (1)..(25): SEQ ID NO: 7892; WAN024AYY; Start 157; Stop 181
cataccttggaagaagtcaatacct

SEQ ID NO: 478163 - DNA, 25 bp, Artificial
  probe
  misc_feature (1)..(25): SEQ ID NO: 7892; WAN024AYY; Start 156; Stop 180
tcataccttggaagaagtcaatacc

SEQ ID NO: 478164 - DNA, 25 bp, Artificial
  probe
  misc_feature (1)..(25): SEQ ID NO: 7892; WAN024AYY; Start 152; Stop 176
agattcataccttggaagaagtcaa

SEQ ID NO: 478165 - DNA, 25 bp, Artificial
  probe
  misc_feature (1)..(25): SEQ ID NO: 7892; WAN024AYY; Start 158; Stop 182
ataccttggaagaagtcaatacctt

SEQ ID NO: 478166 - DNA, 25 bp, Artificial
  probe
  misc_feature (1)..(25): SEQ ID NO: 7892; WAN024AYY; Start 101; Stop 125
gactcaatcagacactacaatctcg

SEQ ID NO: 478167 - DNA, 25 bp, Artificial
  probe
  misc_feature (1)..(25): SEQ ID NO: 7892; WAN024AYY; Start 51; Stop 75
gattcttctggagacaacctctatc

SEQ ID NO: 478168 - DNA, 25 bp, Artificial
  probe
  misc_feature (1)..(25): SEQ ID NO: 7892; WAN024AYY; Start 153; Stop 177
gattcataccttggaagaagtcaat

SEQ ID NO: 478169 - DNA, 25 bp, Artificial
  probe
  misc_feature (1)..(25): SEQ ID NO: 7892; WAN024AYY; Start 310; Stop 334
gatagtagacaccatatccgattcc

SEQ ID NO: 478170 - DNA, 25 bp, Artificial
  probe
  misc_feature (1)..(25): SEQ ID NO: 7892; WAN024AYY; Start 309; Stop 333
cgatagtagacaccatatccgattc

SEQ ID NO: 478171 - DNA, 25 bp, Artificial
  probe
  misc_feature (1)..(25): SEQ ID NO: 7892; WAN024AYY; Start 155; Stop 179
ttcataccttggaagaagtcaatac

SEQ ID NO: 478172 - DNA, 25 bp, Artificial
  probe
  misc_feature (1)..(25): SEQ ID NO: 7892; WAN024AYY; Start 417; Stop 441
tgacggagacatctacctcaatatc

SEQ ID NO: 478173 - DNA, 25 bp, Artificial
  probe
  misc_feature (1)..(25): SEQ ID NO: 7892; WAN024AYY; Start 50; Stop 74
ggattcttctggagacaacctctat

SEQ ID NO: 478174 - DNA, 25 bp, Artificial
  probe
  misc_feature (1)..(25): SEQ ID NO: 7892; WAN024AYY; Start 422; Stop 446
gagacatctacctcaatatcgctga

SEQ ID NO: 478175 - DNA, 25 bp, Artificial
  probe
  misc_feature (1)..(25): SEQ ID NO: 7892; WAN024AYY; Start 423; Stop 447
agacatctacctcaatatcgctgac

SEQ ID NO: 478176 - DNA, 25 bp, Artificial
  probe
  misc_feature (1)..(25): SEQ ID NO: 7892; WAN024AYY; Start 614; Stop 638
gcttaattctcctcaactacaagta

SEQ ID NO: 478177 - DNA, 25 bp, Artificial
  probe
  misc_feature (1)..(25): SEQ ID NO: 7892; WAN024AYY; Start 154; Stop 178
attcataccttggaagaagtcaata

SEQ ID NO: 478178 - DNA, 25 bp, Artificial
  probe
  misc_feature (1)..(25): SEQ ID NO: 7892; WAN024AYY; Start 418; Stop 442
gacggagacatctacctcaatatcg

SEQ ID NO: 478179 - DNA, 25 bp, Artificial
  probe
  misc_feature (1)..(25): SEQ ID NO: 7892; WAN024AYY; Start 52; Stop 76
attcttctggagacaacctctatcc

SEQ ID NO: 478180 - DNA, 25 bp, Artificial
  probe
  misc_feature (1)..(25): SEQ ID NO: 7892; WAN024AYY; Start 613; Stop 637
agcttaattctcctcaactacaagt

SEQ ID NO: 478181 - DNA, 25 bp, Artificial
  probe
  misc_feature (1)..(25): SEQ ID NO: 7892; WAN024AYY; Start 523; Stop 547
aagaaagacacaagtatatccctcc

SEQ ID NO: 478182 - DNA, 25 bp, Artificial
  probe
  misc_feature (1)..(25): SEQ ID NO: 7892; WAN024AYY; Start 102; Stop 126
actcaatcagacactacaatctcgc

SEQ ID NO: 478183 - DNA, 25 bp, Artificial
  probe
  misc_feature (1)..(25): SEQ ID NO: 7892; WAN024AYY; Start 421; Stop 445
ggagacatctacctcaatatcgctg

SEQ ID NO: 478184 - DNA, 25 bp, Artificial
  probe
  misc_feature (1)..(25): SEQ ID NO: 7892; WAN024AYY; Start 525; Stop 549
gaaagacacaagtatatccctccac

SEQ ID NO: 478185 - DNA, 25 bp, Artificial
  probe
  misc_feature (1)..(25): SEQ ID NO: 7892; WAN024AYY; Start 524; Stop 548
agaaagacacaagtatatccctcca

SEQ ID NO: 478186 - DNA, 25 bp, Artificial
  probe
  misc_feature (1)..(25): SEQ ID NO: 7892; WAN024AYY; Start 186; Stop 210
gctttcctacatccaaacctttaat

SEQ ID NO: 478187 - DNA, 25 bp, Artificial
  probe
  misc_feature (1)..(25): SEQ ID NO: 7892; WAN024AYY; Start 185; Stop 209
tgctttcctacatccaaacctttaa

SEQ ID NO: 478188 - DNA, 25 bp, Artificial
  probe
  misc_feature (1)..(25): SEQ ID NO: 7892; WAN024AYY; Start 612; Stop 636
gagcttaattctcctcaactacaag

SEQ ID NO: 478189 - DNA, 25 bp, Artificial
  probe
  misc_feature (1)..(25): SEQ ID NO: 7892; WAN024AYY; Start 184; Stop 208
ctgctttcctacatccaaaccttta

SEQ ID NO: 478190 - DNA, 25 bp, Artificial
  probe
  misc_feature (1)..(25): SEQ ID NO: 7893; WAN024BIU; Start 7; Stop 31
tttcttggacacattgatcctggat

SEQ ID NO: 478191 - DNA, 25 bp, Artificial
  probe
  misc_feature (1)..(25): SEQ ID NO: 7893; WAN024BIU; Start 6; Stop 30
gtttcttggacacattgatcctgga

SEQ ID NO: 478192 - DNA, 25 bp, Artificial
  probe
  misc_feature (1)..(25): SEQ ID NO: 7893; WAN024BIU; Start 4; Stop 28
tggtttcttggacacattgatcctg

SEQ ID NO: 478193 - DNA, 25 bp, Artificial
  probe
  misc_feature (1)..(25): SEQ ID NO: 7893; WAN024BIU; Start 3; Stop 27
gtggtttcttggacacattgatcct

SEQ ID NO: 478194 - DNA, 25 bp, Artificial
  probe
  misc_feature (1)..(25): SEQ ID NO: 7893; WAN024BIU; Start 8; Stop 32
ttcttggacacattgatcctggatc

SEQ ID NO: 478195 - DNA, 25 bp, Artificial
  probe
  misc_feature (1)..(25): SEQ ID NO: 7893; WAN024BIU; Start 5; Stop 29
ggtttcttggacacattgatcctgg

SEQ ID NO: 478196 - DNA, 25 bp, Artificial
  probe
  misc_feature (1)..(25): SEQ ID NO: 7893; WAN024BIU; Start 2; Stop 26
tgtggtttcttggacacattgatcc

SEQ ID NO: 478197 - DNA, 25 bp, Artificial
  probe
  misc_feature (1)..(25): SEQ ID NO: 7894; WAN024BIV; Start 56; Stop 80
ctgctattttagaaactggagtggt

SEQ ID NO: 478198 - DNA, 25 bp, Artificial
  probe
  misc_feature (1)..(25): SEQ ID NO: 7894; WAN024BIV; Start 57; Stop 81
tgctattttagaaactggagtggtt

SEQ ID NO: 478199 - DNA, 25 bp, Artificial
  probe
  misc_feature (1)..(25): SEQ ID NO: 7894; WAN024BIV; Start 55; Stop 79
actgctattttagaaactggagtgg

SEQ ID NO: 478200 - DNA, 25 bp, Artificial
  probe
  misc_feature (1)..(25): SEQ ID NO: 7894; WAN024BIV; Start 54; Stop 78
tactgctattttagaaactggagtg

SEQ ID NO: 478201 - DNA, 25 bp, Artificial
  probe
  misc_feature (1)..(25): SEQ ID NO: 7894; WAN024BIV; Start 53; Stop 77
ttactgctattttagaaactggagt

SEQ ID NO: 478202 - DNA, 25 bp, Artificial
  probe
  misc_feature (1)..(25): SEQ ID NO: 7894; WAN024BIV; Start 52; Stop 76
tttactgctattttagaaactggag

SEQ ID NO: 478203 - DNA, 25 bp, Artificial
  probe
  misc_feature (1)..(25): SEQ ID NO: 7894; WAN024BIV; Start 51; Stop 75
ctttactgctattttagaaactgga

SEQ ID NO: 478204 - DNA, 25 bp, Artificial
  probe
  misc_feature (1)..(25): SEQ ID NO: 7895; WAN024BIQ; Start 27; Stop 51
tggatcattctcatcaggattacta

SEQ ID NO: 478205 - DNA, 25 bp, Artificial
  probe
  misc_feature (1)..(25): SEQ ID NO: 7895; WAN024BIQ; Start 28; Stop 52
ggatcattctcatcaggattactat

SEQ ID NO: 478206 - DNA, 25 bp, Artificial
  probe
  misc_feature (1)..(25): SEQ ID NO: 7895; WAN024BIQ; Start 35; Stop 59
tctcatcaggattactatttactgc

SEQ ID NO: 478207 - DNA, 25 bp, Artificial
  probe
  misc_feature (1)..(25): SEQ ID NO: 7895; WAN024BIQ; Start 36; Stop 60
ctcatcaggattactatttactgct

SEQ ID NO: 478208 - DNA, 25 bp, Artificial
  probe
  misc_feature (1)..(25): SEQ ID NO: 7895; WAN024BIQ; Start 29; Stop 53
gatcattctcatcaggattactatt

SEQ ID NO: 478209 - DNA, 25 bp, Artificial
  probe
  misc_feature (1)..(25): SEQ ID NO: 7895; WAN024BIQ; Start 37; Stop 61
tcatcaggattactatttactgcta

SEQ ID NO: 478210 - DNA, 25 bp, Artificial
  probe
  misc_feature (1)..(25): SEQ ID NO: 7895; WAN024BIQ; Start 51; Stop 75
atttactgctattttagaaactggg

SEQ ID NO: 478211 - DNA, 25 bp, Artificial
  probe
  misc_feature (1)..(25): SEQ ID NO: 7895; WAN024BIQ; Start 16; Stop 40
catatcgatcctggatcattctcat

SEQ ID NO: 478212 - DNA, 25 bp, Artificial
  probe
  misc_feature (1)..(25): SEQ ID NO: 7895; WAN024BIQ; Start 17; Stop 41
atatcgatcctggatcattctcatc

SEQ ID NO: 478213 - DNA, 25 bp, Artificial
  probe
  misc_feature (1)..(25): SEQ ID NO: 7895; WAN024BIQ; Start 14; Stop 38
gacatatcgatcctggatcattctc

SEQ ID NO: 478214 - DNA, 25 bp, Artificial
  probe
  misc_feature (1)..(25): SEQ ID NO: 7895; WAN024BIQ; Start 18; Stop 42
tatcgatcctggatcattctcatca

SEQ ID NO: 478215 - DNA, 25 bp, Artificial
  probe
  misc_feature (1)..(25): SEQ ID NO: 7895; WAN024BIQ; Start 15; Stop 39
acatatcgatcctggatcattctca

SEQ ID NO: 478216 - DNA, 25 bp, Artificial
  probe
  misc_feature (1)..(25): SEQ ID NO: 7895; WAN024BIQ; Start 38; Stop 62
catcaggattactatttactgctat

SEQ ID NO: 478217 - DNA, 25 bp, Artificial
  probe
  misc_feature (1)..(25): SEQ ID NO: 7895; WAN024BIQ; Start 30; Stop 54
atcattctcatcaggattactattt

SEQ ID NO: 478218 - DNA, 25 bp, Artificial
  probe
  misc_feature (1)..(25): SEQ ID NO: 7895; WAN024BIQ; Start 11; Stop 35
ttggacatatcgatcctggatcatt

SEQ ID NO: 478219 - DNA, 25 bp, Artificial
  probe
  misc_feature (1)..(25): SEQ ID NO: 7895; WAN024BIQ; Start 34; Stop 58
ttctcatcaggattactatttactg

SEQ ID NO: 478220 - DNA, 25 bp, Artificial
  probe
  misc_feature (1)..(25): SEQ ID NO: 7895; WAN024BIQ; Start 13; Stop 37
ggacatatcgatcctggatcattct

SEQ ID NO: 478221 - DNA, 25 bp, Artificial
  probe
  misc_feature (1)..(25): SEQ ID NO: 7895; WAN024BIQ; Start 19; Stop 43
atcgatcctggatcattctcatcag

SEQ ID NO: 478222 - DNA, 25 bp, Artificial
  probe
  misc_feature (1)..(25): SEQ ID NO: 7895; WAN024BIQ; Start 12; Stop 36
tggacatatcgatcctggatcattc

SEQ ID NO: 478223 - DNA, 25 bp, Artificial
  probe
  misc_feature (1)..(25): SEQ ID NO: 7895; WAN024BIQ; Start 32; Stop 56
cattctcatcaggattactatttac

SEQ ID NO: 478224 - DNA, 25 bp, Artificial
  probe
  misc_feature (1)..(25): SEQ ID NO: 7895; WAN024BIQ; Start 40; Stop 64
tcaggattactatttactgctattt

SEQ ID NO: 478225 - DNA, 25 bp, Artificial
  probe
  misc_feature (1)..(25): SEQ ID NO: 7895; WAN024BIQ; Start 33; Stop 57
attctcatcaggattactatttact

SEQ ID NO: 478226 - DNA, 25 bp, Artificial
  probe
  misc_feature (1)..(25): SEQ ID NO: 7895; WAN024BIQ; Start 31; Stop 55
tcattctcatcaggattactattta

SEQ ID NO: 478227 - DNA, 25 bp, Artificial
  probe
  misc_feature (1)..(25): SEQ ID NO: 7895; WAN024BIQ; Start 39; Stop 63
atcaggattactatttactgctatt

SEQ ID NO: 478228 - DNA, 25 bp, Artificial
  probe
  misc_feature (1)..(25): SEQ ID NO: 7895; WAN024BIQ; Start 10; Stop 34
tttggacatatcgatcctggatcat

SEQ ID NO: 478229 - DNA, 25 bp, Artificial
  probe
  misc_feature (1)..(25): SEQ ID NO: 7895; WAN024BIQ; Start 50; Stop 74
tatttactgctattttagaaactgg

SEQ ID NO: 478230 - DNA, 25 bp, Artificial
  probe
  misc_feature (1)..(25): SEQ ID NO: 7895; WAN024BIQ; Start 20; Stop 44
tcgatcctggatcattctcatcagg

SEQ ID NO: 478231 - DNA, 25 bp, Artificial
  probe
  misc_feature (1)..(25): SEQ ID NO: 7895; WAN024BIQ; Start 9; Stop 33
ttttggacatatcgatcctggatca

SEQ ID NO: 478232 - DNA, 25 bp, Artificial
  probe
  misc_feature (1)..(25): SEQ ID NO: 7896; WAN024B9M; Start 8; Stop 32
tgtcagtcttatctacaacctcaaa

SEQ ID NO: 478233 - DNA, 25 bp, Artificial
  probe
  misc_feature (1)..(25): SEQ ID NO: 7896; WAN024B9M; Start 7; Stop 31
ttgtcagtcttatctacaacctcaa

SEQ ID NO: 478234 - DNA, 25 bp, Artificial
  probe
  misc_feature (1)..(25): SEQ ID NO: 7896; WAN024B9M; Start 6; Stop 30
tttgtcagtcttatctacaacctca

SEQ ID NO: 478235 - DNA, 25 bp, Artificial
  probe
  misc_feature (1)..(25): SEQ ID NO: 7896; WAN024B9M; Start 4; Stop 28
actttgtcagtcttatctacaacct

SEQ ID NO: 478236 - DNA, 25 bp, Artificial
  probe
  misc_feature (1)..(25): SEQ ID NO: 7896; WAN024B9M; Start 5; Stop 29
ctttgtcagtcttatctacaacctc

SEQ ID NO: 478237 - DNA, 25 bp, Artificial
  probe
  misc_feature (1)..(25): SEQ ID NO: 7896; WAN024B9M; Start 3; Stop 27
gactttgtcagtcttatctacaacc

SEQ ID NO: 478238 - DNA, 25 bp, Artificial
  probe
  misc_feature (1)..(25): SEQ ID NO: 7896; WAN024B9M; Start 2; Stop 26
tgactttgtcagtcttatctacaac

SEQ ID NO: 478239 - DNA, 25 bp, Artificial
  probe
  misc_feature (1)..(25): SEQ ID NO: 7897; WAN024B4Y; Start 330; Stop 354
cttgcgaatgacagttgaagttgaa

SEQ ID NO: 478240 - DNA, 25 bp, Artificial
  probe
  misc_feature (1)..(25): SEQ ID NO: 7897; WAN024B4Y; Start 333; Stop 357
gcgaatgacagttgaagttgaaatg

SEQ ID NO: 478241 - DNA, 25 bp, Artificial
  probe
  misc_feature (1)..(25): SEQ ID NO: 7897; WAN024B4Y; Start 332; Stop 356
tgcgaatgacagttgaagttgaaat

SEQ ID NO: 478242 - DNA, 25 bp, Artificial
  probe
  misc_feature (1)..(25): SEQ ID NO: 7897; WAN024B4Y; Start 331; Stop 355
ttgcgaatgacagttgaagttgaaa

SEQ ID NO: 478243 - DNA, 25 bp, Artificial
  probe
  misc_feature (1)..(25): SEQ ID NO: 7897; WAN024B4Y; Start 324; Stop 348
attgagcttgcgaatgacagttgaa

SEQ ID NO: 478244 - DNA, 25 bp, Artificial
  probe
  misc_feature (1)..(25): SEQ ID NO: 7897; WAN024B4Y; Start 118; Stop 142
gacaactctatcgtagcgaagaaag

SEQ ID NO: 478245 - DNA, 25 bp, Artificial
  probe
  misc_feature (1)..(25): SEQ ID NO: 7897; WAN024B4Y; Start 122; Stop 146
actctatcgtagcgaagaaagtgat

SEQ ID NO: 478246 - DNA, 25 bp, Artificial
  probe
  misc_feature (1)..(25): SEQ ID NO: 7897; WAN024B4Y; Start 329; Stop 353
gcttgcgaatgacagttgaagttga

SEQ ID NO: 478247 - DNA, 25 bp, Artificial
  probe
  misc_feature (1)..(25): SEQ ID NO: 7897; WAN024B4Y; Start 121; Stop 145
aactctatcgtagcgaagaaagtga

SEQ ID NO: 478248 - DNA, 25 bp, Artificial
  probe
  misc_feature (1)..(25): SEQ ID NO: 7897; WAN024B4Y; Start 120; Stop 144
caactctatcgtagcgaagaaagtg

SEQ ID NO: 478249 - DNA, 25 bp, Artificial
  probe
  misc_feature (1)..(25): SEQ ID NO: 7897; WAN024B4Y; Start 119; Stop 143
acaactctatcgtagcgaagaaagt

SEQ ID NO: 478250 - DNA, 25 bp, Artificial
  probe
  misc_feature (1)..(25): SEQ ID NO: 7897; WAN024B4Y; Start 111; Stop 135
gacatcggacaactctatcgtagcg

SEQ ID NO: 478251 - DNA, 25 bp, Artificial
  probe
  misc_feature (1)..(25): SEQ ID NO: 7897; WAN024B4Y; Start 117; Stop 141
ggacaactctatcgtagcgaagaaa

SEQ ID NO: 478252 - DNA, 25 bp, Artificial
  probe
  misc_feature (1)..(25): SEQ ID NO: 7897; WAN024B4Y; Start 327; Stop 351
gagcttgcgaatgacagttgaagtt

SEQ ID NO: 478253 - DNA, 25 bp, Artificial
  probe
  misc_feature (1)..(25): SEQ ID NO: 7897; WAN024B4Y; Start 325; Stop 349
ttgagcttgcgaatgacagttgaag

SEQ ID NO: 478254 - DNA, 25 bp, Artificial
  probe
  misc_feature (1)..(25): SEQ ID NO: 7897; WAN024B4Y; Start 328; Stop 352
agcttgcgaatgacagttgaagttg

SEQ ID NO: 478255 - DNA, 25 bp, Artificial
  probe
  misc_feature (1)..(25): SEQ ID NO: 7897; WAN024B4Y; Start 114; Stop 138
atcggacaactctatcgtagcgaag

SEQ ID NO: 478256 - DNA, 25 bp, Artificial
  probe
  misc_feature (1)..(25): SEQ ID NO: 7897; WAN024B4Y; Start 72; Stop 96
agtaaggactaaacatatccatagt

SEQ ID NO: 478257 - DNA, 25 bp, Artificial
  probe
  misc_feature (1)..(25): SEQ ID NO: 7897; WAN024B4Y; Start 116; Stop 140
cggacaactctatcgtagcgaagaa

SEQ ID NO: 478258 - DNA, 25 bp, Artificial
  probe
  misc_feature (1)..(25): SEQ ID NO: 7897; WAN024B4Y; Start 113; Stop 137
catcggacaactctatcgtagcgaa

SEQ ID NO: 478259 - DNA, 25 bp, Artificial
  probe
  misc_feature (1)..(25): SEQ ID NO: 7897; WAN024B4Y; Start 314; Stop 338
agtggaagtcattgagcttgcgaat

SEQ ID NO: 478260 - DNA, 25 bp, Artificial
  probe
  misc_feature (1)..(25): SEQ ID NO: 7897; WAN024B4Y; Start 115; Stop 139
tcggacaactctatcgtagcgaaga

SEQ ID NO: 478261 - DNA, 25 bp, Artificial
  probe
  misc_feature (1)..(25): SEQ ID NO: 7897; WAN024B4Y; Start 110; Stop 134
cgacatcggacaactctatcgtagc

SEQ ID NO: 478262 - DNA, 25 bp, Artificial
  probe
  misc_feature (1)..(25): SEQ ID NO: 7897; WAN024B4Y; Start 109; Stop 133
gcgacatcggacaactctatcgtag

SEQ ID NO: 478263 - DNA, 25 bp, Artificial
  probe
  misc_feature (1)..(25): SEQ ID NO: 7897; WAN024B4Y; Start 315; Stop 339
gtggaagtcattgagcttgcgaatg

SEQ ID NO: 478264 - DNA, 25 bp, Artificial
  probe
  misc_feature (1)..(25): SEQ ID NO: 7897; WAN024B4Y; Start 73; Stop 97
gtaaggactaaacatatccatagta

SEQ ID NO: 478265 - DNA, 25 bp, Artificial
  probe
  misc_feature (1)..(25): SEQ ID NO: 7897; WAN024B4Y; Start 310; Stop 334
tcaaagtggaagtcattgagcttgc

SEQ ID NO: 478266 - DNA, 25 bp, Artificial
  probe
  misc_feature (1)..(25): SEQ ID NO: 7897; WAN024B4Y; Start 75; Stop 99
aaggactaaacatatccatagtaat

SEQ ID NO: 478267 - DNA, 25 bp, Artificial
  probe
  misc_feature (1)..(25): SEQ ID NO: 7897; WAN024B4Y; Start 311; Stop 335
caaagtggaagtcattgagcttgcg

SEQ ID NO: 478268 - DNA, 25 bp, Artificial
  probe
  misc_feature (1)..(25): SEQ ID NO: 7897; WAN024B4Y; Start 97; Stop 121
aataattttgacgcgacatcggaca

SEQ ID NO: 478269 - DNA, 25 bp, Artificial
  probe
  misc_feature (1)..(25): SEQ ID NO: 7897; WAN024B4Y; Start 98; Stop 122
ataattttgacgcgacatcggacaa

SEQ ID NO: 478270 - DNA, 25 bp, Artificial
  probe
  misc_feature (1)..(25): SEQ ID NO: 7897; WAN024B4Y; Start 316; Stop 340
tggaagtcattgagcttgcgaatga

SEQ ID NO: 478271 - DNA, 25 bp, Artificial
  probe
  misc_feature (1)..(25): SEQ ID NO: 7897; WAN024B4Y; Start 99; Stop 123
taattttgacgcgacatcggacaac

SEQ ID NO: 478272 - DNA, 25 bp, Artificial
  probe
  misc_feature (1)..(25): SEQ ID NO: 7898; WAN024BCE; Start 62; Stop 86
aagtcagtacacatctatacggcaa

SEQ ID NO: 478273 - DNA, 25 bp, Artificial
  probe
  misc_feature (1)..(25): SEQ ID NO: 7898; WAN024BCE; Start 59; Stop 83
acgaagtcagtacacatctatacgg

SEQ ID NO: 478274 - DNA, 25 bp, Artificial
  probe
  misc_feature (1)..(25): SEQ ID NO: 7898; WAN024BCE; Start 63; Stop 87
agtcagtacacatctatacggcaag

SEQ ID NO: 478275 - DNA, 25 bp, Artificial
  probe
  misc_feature (1)..(25): SEQ ID NO: 7898; WAN024BCE; Start 61; Stop 85
gaagtcagtacacatctatacggca

SEQ ID NO: 478276 - DNA, 25 bp, Artificial
  probe
  misc_feature (1)..(25): SEQ ID NO: 7898; WAN024BCE; Start 58; Stop 82
gacgaagtcagtacacatctatacg

SEQ ID NO: 478277 - DNA, 25 bp, Artificial
  probe
  misc_feature (1)..(25): SEQ ID NO: 7898; WAN024BCE; Start 69; Stop 93
tacacatctatacggcaaggtgaag

SEQ ID NO: 478278 - DNA, 25 bp, Artificial
  probe
  misc_feature (1)..(25): SEQ ID NO: 7898; WAN024BCE; Start 64; Stop 88
gtcagtacacatctatacggcaagg

SEQ ID NO: 478279 - DNA, 25 bp, Artificial
  probe
  misc_feature (1)..(25): SEQ ID NO: 7898; WAN024BCE; Start 60; Stop 84
cgaagtcagtacacatctatacggc

SEQ ID NO: 478280 - DNA, 25 bp, Artificial
  probe
  misc_feature (1)..(25): SEQ ID NO: 7898; WAN024BCE; Start 65; Stop 89
tcagtacacatctatacggcaaggt

SEQ ID NO: 478281 - DNA, 25 bp, Artificial
  probe
  misc_feature (1)..(25): SEQ ID NO: 7898; WAN024BCE; Start 68; Stop 92
gtacacatctatacggcaaggtgaa

SEQ ID NO: 478282 - DNA, 25 bp, Artificial
  probe
  misc_feature (1)..(25): SEQ ID NO: 7898; WAN024BCE; Start 67; Stop 91
agtacacatctatacggcaaggtga

SEQ ID NO: 478283 - DNA, 25 bp, Artificial
  probe
  misc_feature (1)..(25): SEQ ID NO: 7898; WAN024BCE; Start 66; Stop 90
cagtacacatctatacggcaaggtg

SEQ ID NO: 478284 - DNA, 25 bp, Artificial
  probe
  misc_feature (1)..(25): SEQ ID NO: 7898; WAN024BCE; Start 57; Stop 81
tgacgaagtcagtacacatctatac

SEQ ID NO: 478285 - DNA, 25 bp, Artificial
  probe
  misc_feature (1)..(25): SEQ ID NO: 7898; WAN024BCE; Start 74; Stop 98
atctatacggcaaggtgaagctgac

SEQ ID NO: 478286 - DNA, 25 bp, Artificial
  probe
  misc_feature (1)..(25): SEQ ID NO: 7898; WAN024BCE; Start 73; Stop 97
catctatacggcaaggtgaagctga

SEQ ID NO: 478287 - DNA, 25 bp, Artificial
  probe
  misc_feature (1)..(25): SEQ ID NO: 7898; WAN024BCE; Start 72; Stop 96
acatctatacggcaaggtgaagctg

SEQ ID NO: 478288 - DNA, 25 bp, Artificial
  probe
  misc_feature (1)..(25): SEQ ID NO: 7898; WAN024BCE; Start 70; Stop 94
acacatctatacggcaaggtgaagc

SEQ ID NO: 478289 - DNA, 25 bp, Artificial
  probe
  misc_feature (1)..(25): SEQ ID NO: 7898; WAN024BCE; Start 71; Stop 95
cacatctatacggcaaggtgaagct

SEQ ID NO: 478290 - DNA, 25 bp, Artificial
  probe
  misc_feature (1)..(25): SEQ ID NO: 7899; WAN024BBG; Start 39; Stop 63
aaaacagtgttttgagctacctgcg

SEQ ID NO: 478291 - DNA, 25 bp, Artificial
  probe
  misc_feature (1)..(25): SEQ ID NO: 7901; WAN024BCR; Start 82; Stop 106
actcaaaatcaaggatttctaacta

SEQ ID NO: 478292 - DNA, 25 bp, Artificial
  probe
  misc_feature (1)..(25): SEQ ID NO: 7901; WAN024BCR; Start 81; Stop 105
tactcaaaatcaaggatttctaact

SEQ ID NO: 478293 - DNA, 25 bp, Artificial
  probe
  misc_feature (1)..(25): SEQ ID NO: 7901; WAN024BCR; Start 77; Stop 101
gatttactcaaaatcaaggatttct

SEQ ID NO: 478294 - DNA, 25 bp, Artificial
  probe
  misc_feature (1)..(25): SEQ ID NO: 7901; WAN024BCR; Start 76; Stop 100
agatttactcaaaatcaaggatttc

SEQ ID NO: 478295 - DNA, 25 bp, Artificial
  probe
  misc_feature (1)..(25): SEQ ID NO: 7901; WAN024BCR; Start 80; Stop 104
ttactcaaaatcaaggatttctaac

SEQ ID NO: 478296 - DNA, 25 bp, Artificial
  probe
  misc_feature (1)..(25): SEQ ID NO: 7901; WAN024BCR; Start 83; Stop 107
ctcaaaatcaaggatttctaactaa

SEQ ID NO: 478297 - DNA, 25 bp, Artificial
  probe
  misc_feature (1)..(25): SEQ ID NO: 7902; WAN024DR9; Start 13; Stop 37
ttagttacagggagaaatagggaaa

SEQ ID NO: 478298 - DNA, 25 bp, Artificial
  probe
  misc_feature (1)..(25): SEQ ID NO: 7902; WAN024DR9; Start 12; Stop 36
tttagttacagggagaaatagggaa

SEQ ID NO: 478299 - DNA, 25 bp, Artificial
  probe
  misc_feature (1)..(25): SEQ ID NO: 7902; WAN024DR9; Start 55; Stop 79
ccgaagttaataggtaaattcccaa

SEQ ID NO: 478300 - DNA, 25 bp, Artificial
  probe
  misc_feature (1)..(25): SEQ ID NO: 7902; WAN024DR9; Start 54; Stop 78
accgaagttaataggtaaattccca

SEQ ID NO: 478301 - DNA, 25 bp, Artificial
  probe
  misc_feature (1)..(25): SEQ ID NO: 7902; WAN024DR9; Start 56; Stop 80
cgaagttaataggtaaattcccaaa

SEQ ID NO: 478302 - DNA, 25 bp, Artificial
  probe
  misc_feature (1)..(25): SEQ ID NO: 7902; WAN024DR9; Start 14; Stop 38
tagttacagggagaaatagggaaaa

SEQ ID NO: 478303 - DNA, 25 bp, Artificial
  probe
  misc_feature (1)..(25): SEQ ID NO: 7902; WAN024DR9; Start 11; Stop 35
ttttagttacagggagaaataggga

SEQ ID NO: 478304 - DNA, 25 bp, Artificial
  probe
  misc_feature (1)..(25): SEQ ID NO: 7902; WAN024DR9; Start 5; Stop 29
aaaggattttagttacagggagaaa

SEQ ID NO: 478305 - DNA, 25 bp, Artificial
  probe
  misc_feature (1)..(25): SEQ ID NO: 7902; WAN024DR9; Start 2; Stop 26
tgaaaaggattttagttacagggag

SEQ ID NO: 478306 - DNA, 25 bp, Artificial
  probe
  misc_feature (1)..(25): SEQ ID NO: 7902; WAN024DR9; Start 10; Stop 34
attttagttacagggagaaataggg

SEQ ID NO: 478307 - DNA, 25 bp, Artificial
  probe
  misc_feature (1)..(25): SEQ ID NO: 7902; WAN024DR9; Start 3; Stop 27
gaaaaggattttagttacagggaga

SEQ ID NO: 478308 - DNA, 25 bp, Artificial
  probe
  misc_feature (1)..(25): SEQ ID NO: 7902; WAN024DR9; Start 1; Stop 25
ttgaaaaggattttagttacaggga

SEQ ID NO: 478309 - DNA, 25 bp, Artificial
  probe
  misc_feature (1)..(25): SEQ ID NO: 7902; WAN024DR9; Start 53; Stop 77
taccgaagttaataggtaaattccc

SEQ ID NO: 478310 - DNA, 25 bp, Artificial
  probe
  misc_feature (1)..(25): SEQ ID NO: 7902; WAN024DR9; Start 6; Stop 30
aaggattttagttacagggagaaat

SEQ ID NO: 478311 - DNA, 25 bp, Artificial
  probe
  misc_feature (1)..(25): SEQ ID NO: 7902; WAN024DR9; Start 4; Stop 28
aaaaggattttagttacagggagaa

SEQ ID NO: 478312 - DNA, 25 bp, Artificial
  probe
  misc_feature (1)..(25): SEQ ID NO: 7902; WAN024DR9; Start 7; Stop 31
aggattttagttacagggagaaata

SEQ ID NO: 478313 - DNA, 25 bp, Artificial
  probe
  misc_feature (1)..(25): SEQ ID NO: 7902; WAN024DR9; Start 57; Stop 81
gaagttaataggtaaattcccaaat

SEQ ID NO: 478314 - DNA, 25 bp, Artificial
  probe
  misc_feature (1)..(25): SEQ ID NO: 7902; WAN024DR9; Start 52; Stop 76
ctaccgaagttaataggtaaattcc

SEQ ID NO: 478315 - DNA, 25 bp, Artificial
  probe
  misc_feature (1)..(25): SEQ ID NO: 7902; WAN024DR9; Start 9; Stop 33
gattttagttacagggagaaatagg

SEQ ID NO: 478316 - DNA, 25 bp, Artificial
  probe
  misc_feature (1)..(25): SEQ ID NO: 7902; WAN024DR9; Start 8; Stop 32
ggattttagttacagggagaaatag

SEQ ID NO: 478317 - DNA, 25 bp, Artificial
  probe
  misc_feature (1)..(25): SEQ ID NO: 7902; WAN024DR9; Start 51; Stop 75
tctaccgaagttaataggtaaattc

SEQ ID NO: 478318 - DNA, 25 bp, Artificial
  probe
  misc_feature (1)..(25): SEQ ID NO: 7902; WAN024DR9; Start 48; Stop 72
aaatctaccgaagttaataggtaaa

SEQ ID NO: 478319 - DNA, 25 bp, Artificial
  probe
  misc_feature (1)..(25): SEQ ID NO: 7902; WAN024DR9; Start 50; Stop 74
atctaccgaagttaataggtaaatt

SEQ ID NO: 478320 - DNA, 25 bp, Artificial
  probe
  misc_feature (1)..(25): SEQ ID NO: 7902; WAN024DR9; Start 49; Stop 73
aatctaccgaagttaataggtaaat

SEQ ID NO: 478321 - DNA, 25 bp, Artificial
  probe
  misc_feature (1)..(25): SEQ ID NO: 7902; WAN024DR9; Start 47; Stop 71
aaaatctaccgaagttaataggtaa

SEQ ID NO: 478322 - DNA, 25 bp, Artificial
  probe
  misc_feature (1)..(25): SEQ ID NO: 7904; WAN024B9Z; Start 65; Stop 89
gcgtcaacgtcatcttggattatat

SEQ ID NO: 478323 - DNA, 25 bp, Artificial
  probe
  misc_feature (1)..(25): SEQ ID NO: 7904; WAN024B9Z; Start 66; Stop 90
cgtcaacgtcatcttggattatata

SEQ ID NO: 478324 - DNA, 25 bp, Artificial
  probe
  misc_feature (1)..(25): SEQ ID NO: 7904; WAN024B9Z; Start 71; Stop 95
acgtcatcttggattatatatgtga

SEQ ID NO: 478325 - DNA, 25 bp, Artificial
  probe
  misc_feature (1)..(25): SEQ ID NO: 7904; WAN024B9Z; Start 70; Stop 94
aacgtcatcttggattatatatgtg

SEQ ID NO: 478326 - DNA, 25 bp, Artificial
  probe
  misc_feature (1)..(25): SEQ ID NO: 7904; WAN024B9Z; Start 69; Stop 93
caacgtcatcttggattatatatgt

SEQ ID NO: 478327 - DNA, 25 bp, Artificial
  probe
  misc_feature (1)..(25): SEQ ID NO: 7904; WAN024B9Z; Start 68; Stop 92
tcaacgtcatcttggattatatatg

SEQ ID NO: 478328 - DNA, 25 bp, Artificial
  probe
  misc_feature (1)..(25): SEQ ID NO: 7904; WAN024B9Z; Start 67; Stop 91
gtcaacgtcatcttggattatatat

SEQ ID NO: 478329 - DNA, 25 bp, Artificial
  probe
  misc_feature (1)..(25): SEQ ID NO: 7904; WAN024B9Z; Start 72; Stop 96
cgtcatcttggattatatatgtgac

SEQ ID NO: 478330 - DNA, 25 bp, Artificial
  probe
  misc_feature (1)..(25): SEQ ID NO: 7904; WAN024B9Z; Start 64; Stop 88
cgcgtcaacgtcatcttggattata

SEQ ID NO: 478331 - DNA, 25 bp, Artificial
  probe
  misc_feature (1)..(25): SEQ ID NO: 7907; WAN024B99; Start 42; Stop 66
aaagattgtcacaaactcctatttt

SEQ ID NO: 478332 - DNA, 25 bp, Artificial
  probe
  misc_feature (1)..(25): SEQ ID NO: 7907; WAN024B99; Start 41; Stop 65
aaaagattgtcacaaactcctattt

SEQ ID NO: 478333 - DNA, 25 bp, Artificial
  probe
  misc_feature (1)..(25): SEQ ID NO: 7908; WAN024AT3; Start 74; Stop 98
caaaacctcttgaattgctaactaa

SEQ ID NO: 478334 - DNA, 25 bp, Artificial
  probe
  misc_feature (1)..(25): SEQ ID NO: 7908; WAN024AT3; Start 75; Stop 99
aaaacctcttgaattgctaactaat

SEQ ID NO: 478335 - DNA, 25 bp, Artificial
  probe
  misc_feature (1)..(25): SEQ ID NO: 7908; WAN024AT3; Start 69; Stop 93
gtcatcaaaacctcttgaattgcta

SEQ ID NO: 478336 - DNA, 25 bp, Artificial
  probe
  misc_feature (1)..(25): SEQ ID NO: 7908; WAN024AT3; Start 71; Stop 95
catcaaaacctcttgaattgctaac

SEQ ID NO: 478337 - DNA, 25 bp, Artificial
  probe
  misc_feature (1)..(25): SEQ ID NO: 7908; WAN024AT3; Start 70; Stop 94
tcatcaaaacctcttgaattgctaa

SEQ ID NO: 478338 - DNA, 25 bp, Artificial
  probe
  misc_feature (1)..(25): SEQ ID NO: 7908; WAN024AT3; Start 72; Stop 96
atcaaaacctcttgaattgctaact

SEQ ID NO: 478339 - DNA, 25 bp, Artificial
  probe
  misc_feature (1)..(25): SEQ ID NO: 7908; WAN024AT3; Start 73; Stop 97
tcaaaacctcttgaattgctaacta

SEQ ID NO: 478340 - DNA, 25 bp, Artificial
  probe
  misc_feature (1)..(25): SEQ ID NO: 7908; WAN024AT3; Start 68; Stop 92
ggtcatcaaaacctcttgaattgct

SEQ ID NO: 478341 - DNA, 25 bp, Artificial
  probe
  misc_feature (1)..(25): SEQ ID NO: 7908; WAN024AT3; Start 67; Stop 91
tggtcatcaaaacctcttgaattgc

SEQ ID NO: 478342 - DNA, 25 bp, Artificial
  probe
  misc_feature (1)..(25): SEQ ID NO: 7909; WAN024B8X; Start 49; Stop 73
ttcatctttaaaagtgattggcctg

SEQ ID NO: 478343 - DNA, 25 bp, Artificial
  probe
  misc_feature (1)..(25): SEQ ID NO: 7909; WAN024B8X; Start 48; Stop 72
tttcatctttaaaagtgattggcct

SEQ ID NO: 478344 - DNA, 25 bp, Artificial
  probe
  misc_feature (1)..(25): SEQ ID NO: 7909; WAN024B8X; Start 51; Stop 75
catctttaaaagtgattggcctgct

SEQ ID NO: 478345 - DNA, 25 bp, Artificial
  probe
  misc_feature (1)..(25): SEQ ID NO: 7909; WAN024B8X; Start 47; Stop 71
ttttcatctttaaaagtgattggcc

SEQ ID NO: 478346 - DNA, 25 bp, Artificial
  probe
  misc_feature (1)..(25): SEQ ID NO: 7909; WAN024B8X; Start 50; Stop 74
tcatctttaaaagtgattggcctgc

SEQ ID NO: 478347 - DNA, 25 bp, Artificial
  probe
  misc_feature (1)..(25): SEQ ID NO: 7912; WAN024BCQ; Start 74; Stop 98
agggtcaagtaagtatagtaaatct

SEQ ID NO: 478348 - DNA, 25 bp, Artificial
  probe
  misc_feature (1)..(25): SEQ ID NO: 7912; WAN024BCQ; Start 73; Stop 97
aagggtcaagtaagtatagtaaatc

SEQ ID NO: 478349 - DNA, 25 bp, Artificial
  probe
  misc_feature (1)..(25): SEQ ID NO: 7912; WAN024BCQ; Start 75; Stop 99
gggtcaagtaagtatagtaaatcta

SEQ ID NO: 478350 - DNA, 25 bp, Artificial
  probe
  misc_feature (1)..(25): SEQ ID NO: 7914; WAN024B6Z; Start 72; Stop 96
gactgtttacattttcagcaagtga

SEQ ID NO: 478351 - DNA, 25 bp, Artificial
  probe
  misc_feature (1)..(25): SEQ ID NO: 7914; WAN024B6Z; Start 71; Stop 95
agactgtttacattttcagcaagtg

SEQ ID NO: 478352 - DNA, 25 bp, Artificial
  probe
  misc_feature (1)..(25): SEQ ID NO: 7914; WAN024B6Z; Start 70; Stop 94
gagactgtttacattttcagcaagt

SEQ ID NO: 478353 - DNA, 25 bp, Artificial
  probe
  misc_feature (1)..(25): SEQ ID NO: 7915; WAN024B73; Start 30; Stop 54
cgatttgctctattcttgtttcatt

SEQ ID NO: 478354 - DNA, 25 bp, Artificial
  probe
  misc_feature (1)..(25): SEQ ID NO: 7915; WAN024B73; Start 29; Stop 53
tcgatttgctctattcttgtttcat

SEQ ID NO: 478355 - DNA, 25 bp, Artificial
  probe
  misc_feature (1)..(25): SEQ ID NO: 7915; WAN024B73; Start 31; Stop 55
gatttgctctattcttgtttcattt

SEQ ID NO: 478356 - DNA, 25 bp, Artificial
  probe
  misc_feature (1)..(25): SEQ ID NO: 7915; WAN024B73; Start 25; Stop 49
ctgatcgatttgctctattcttgtt

SEQ ID NO: 478357 - DNA, 25 bp, Artificial
  probe
  misc_feature (1)..(25): SEQ ID NO: 7915; WAN024B73; Start 23; Stop 47
tcctgatcgatttgctctattcttg

SEQ ID NO: 478358 - DNA, 25 bp, Artificial
  probe
  misc_feature (1)..(25): SEQ ID NO: 7915; WAN024B73; Start 22; Stop 46
gtcctgatcgatttgctctattctt

SEQ ID NO: 478359 - DNA, 25 bp, Artificial
  probe
  misc_feature (1)..(25): SEQ ID NO: 7915; WAN024B73; Start 28; Stop 52
atcgatttgctctattcttgtttca

SEQ ID NO: 478360 - DNA, 25 bp, Artificial
  probe
  misc_feature (1)..(25): SEQ ID NO: 7915; WAN024B73; Start 26; Stop 50
tgatcgatttgctctattcttgttt

SEQ ID NO: 478361 - DNA, 25 bp, Artificial
  probe
  misc_feature (1)..(25): SEQ ID NO: 7915; WAN024B73; Start 24; Stop 48
cctgatcgatttgctctattcttgt

SEQ ID NO: 478362 - DNA, 25 bp, Artificial
  probe
  misc_feature (1)..(25): SEQ ID NO: 7915; WAN024B73; Start 27; Stop 51
gatcgatttgctctattcttgtttc

SEQ ID NO: 478363 - DNA, 25 bp, Artificial
  probe
  misc_feature (1)..(25): SEQ ID NO: 7915; WAN024B73; Start 20; Stop 44
ctgtcctgatcgatttgctctattc

SEQ ID NO: 478364 - DNA, 25 bp, Artificial
  probe
  misc_feature (1)..(25): SEQ ID NO: 7915; WAN024B73; Start 21; Stop 45
tgtcctgatcgatttgctctattct

SEQ ID NO: 478365 - DNA, 25 bp, Artificial
  probe
  misc_feature (1)..(25): SEQ ID NO: 7915; WAN024B73; Start 19; Stop 43
actgtcctgatcgatttgctctatt

SEQ ID NO: 478366 - DNA, 25 bp, Artificial
  probe
  misc_feature (1)..(25): SEQ ID NO: 7915; WAN024B73; Start 35; Stop 59
tgctctattcttgtttcattttact

SEQ ID NO: 478367 - DNA, 25 bp, Artificial
  probe
  misc_feature (1)..(25): SEQ ID NO: 7915; WAN024B73; Start 18; Stop 42
gactgtcctgatcgatttgctctat

SEQ ID NO: 478368 - DNA, 25 bp, Artificial
  probe
  misc_feature (1)..(25): SEQ ID NO: 7915; WAN024B73; Start 34; Stop 58
ttgctctattcttgtttcattttac

SEQ ID NO: 478369 - DNA, 25 bp, Artificial
  probe
  misc_feature (1)..(25): SEQ ID NO: 7915; WAN024B73; Start 14; Stop 38
atttgactgtcctgatcgatttgct

SEQ ID NO: 478370 - DNA, 25 bp, Artificial
  probe
  misc_feature (1)..(25): SEQ ID NO: 7915; WAN024B73; Start 32; Stop 56
atttgctctattcttgtttcatttt

SEQ ID NO: 478371 - DNA, 25 bp, Artificial
  probe
  misc_feature (1)..(25): SEQ ID NO: 7915; WAN024B73; Start 17; Stop 41
tgactgtcctgatcgatttgctcta

SEQ ID NO: 478372 - DNA, 25 bp, Artificial
  probe
  misc_feature (1)..(25): SEQ ID NO: 7915; WAN024B73; Start 15; Stop 39
tttgactgtcctgatcgatttgctc

SEQ ID NO: 478373 - DNA, 25 bp, Artificial
  probe
  misc_feature (1)..(25): SEQ ID NO: 7915; WAN024B73; Start 33; Stop 57
tttgctctattcttgtttcatttta

SEQ ID NO: 478374 - DNA, 25 bp, Artificial
  probe
  misc_feature (1)..(25): SEQ ID NO: 7915; WAN024B73; Start 36; Stop 60
gctctattcttgtttcattttacta

SEQ ID NO: 478375 - DNA, 25 bp, Artificial
  probe
  misc_feature (1)..(25): SEQ ID NO: 7915; WAN024B73; Start 16; Stop 40
ttgactgtcctgatcgatttgctct
